United States Patent Application Publication US 2004/0166519 A1 - sequence listing, part 6

SEQ ID NO: 18290 - DNA, 201 bp, Homo sapiens
ccgcaacctcaaattcttgcgttcaagtgaacctcccactttagcctcccaagtagctgggactacaggcgcacgccatcacacccggctaattgaaaaawttttttttttgtttagatggaatctcactttgttgcccaggctggtctcaaactcctgggctcaagtgatcatcctgcttcagcgtccgacttgttggta

SEQ ID NO: 18291 - DNA, 201 bp, Homo sapiens
accatagctcactgcagcctcgaactcctgagctcaagtgatcctcccacctcatcctcccaagtaattgggactacaggcgcaccccaccatgcccaccttatttatttatttatttatttatttatttattttcatagagatgagggttccctgtgttgtccaggctggtcttgaactcctgagctcaagggatccttt

SEQ ID NO: 18292 - DNA, 201 bp, Homo sapiens
atagctcactgcagcctcgaactcctgagctcaagtgatcctcccacctcatcctcccaagtaattgggactacaggcgcaccccaccatgcccaccttatttatttatttatttatttatttatttattttcatagagatgagggttccctgtgttgtccaggctggtcttgaactcctgagctcaagggatccttttgc

SEQ ID NO: 18293 - DNA, 201 bp, Homo sapiens; identical to SEQ ID NO: 4402

SEQ ID NO: 18294 - DNA, 201 bp, Homo sapiens
tggacatgaagaggaaggctctggactttcctccaggagtttcaggagaaaggtagggcagtggttaagagcagagctctgcctagactagctggggtgcctagactagctggggtgcccagactagctggggtgcctagactagctgggtactttgagtggctccttcagcctggacctcggtttcctcacctgtatagt

SEQ ID NO: 18295 - DNA, 201 bp, Homo sapiens
tagctcactgcagcctcgaactcctgagctcaagtgatcctcccacctcatcctcccaagtaattgggactacaggcgcaccccaccatgcccaccttatttatttatttatttatttatttatttattttcatagagatgagggttccctgtgttgtccaggctggtcttgaactcctgagctcaagggatccttttgcc

SEQ ID NO: 18296 - DNA, 201 bp, Homo sapiens; identical to SEQ ID NO: 4403

SEQ ID NO: 18297 - DNA, 201 bp, Homo sapiens
gacatgaagaggaaggctctggactttcctccaggagtttcaggagaaaggtagggcagtggttaagagcagagctctgcctagactagctggggtgcctagactagctggggtgcccagactagctggggtgcctagactagctgggtactttgagtggctccttcagcctggacctcggtttcctcacctgtatagtag

SEQ ID NO: 18298 - DNA, 201 bp, Homo sapiens
ggatgtgactgggaagctctggtttcagtgtcatgtgtctattctttatttccaggcaaaggaaaccaacaataagaagaaagaatttgaggaaactgcgragaaagtgcgccgtgccatcgagcagctggctgccatggattgaggcctctggccggagctgcctggtcccagagtggctgcaccacttccagggtttat

SEQ ID NO: 18299 - DNA, 201 bp, Homo sapiens; identical to SEQ ID NO: 4405

SEQ ID NO: 18300 - DNA, 201 bp, Homo sapiens
catgaagaggaaggctctggactttcctccaggagtttcaggagaaaggtagggcagtggttaagagcagagctctgcctagactagctggggtgcctagactagctggggtgcccagactagctggggtgcctagactagctgggtactttgagtggctccttcagcctggacctcggtttcctcacctgtatagtagag

SEQ ID NO: 18301 - DNA, 201 bp, Homo sapiens
taattttttttaagttaacctctgtcagcaaacaaatttaacccaataaaggtctttgttttttaatgtagtagaggagttagggtttataaaaaatatgrtagggaagggggtccctggatttgctaatgtgattgtcatttgccccttaggagagagctctgttagcagaatgaaaaaattggaagccagattcaggga

SEQ ID NO: 18302 - DNA, 201 bp, Homo sapiens
tcatttgaccaaaatgccttggggtggacgtaagatgcctgatgcctttcatgttcaacagaatacatcagcagaccctgttgttgtgaactcccaggaaygtccaagtgctttttttgagattttttaaaaaacagtttaattgaaatataacctacacagcacaaaaattaccctttgaaagtgtgcacttcacacttt

SEQ ID NO: 18303 - DNA, 201 bp, Homo sapiens
aaggctctggactttcctccaggagtttcaggagaaaggtagggcagtggttaagagcagagctctgcctagactagctggggtgcctagactagctggggtgcccagactagctggggtgcctagactagctgggtactttgagtggctccttcagcctggacctcggtttcctcacctgtatagtagagatatgggagc

SEQ ID NO: 18304 - DNA, 201 bp, Homo sapiens; identical to SEQ ID NO: 4417

SEQ ID NO: 18305 - DNA, 201 bp, Homo sapiens
tgaagaggaaggctctggactttcctccaggagtttcaggagaaaggtagggcagtggttaagagcagagctctgcctagactagctggggtgcctagactagctggggtgcccagactagctggggtgcctagactagctgggtactttgagtggctccttcagcctggacctcggtttcctcacctgtatagtagagat

SEQ ID NO: 18306 - DNA, 201 bp, Homo sapiens
cctgtaatcccagctactcgggaggctgaggcaggagaatctcttgaacccgggaggcagaggttgcggtgagccaagatcgtgcctttgcacaccagccwaggcaacaagagcgaaagtccgtctcaaaaaaaaagtaattttttttaagttaacctctgtcagcaaacaaatttaacccaataaaggtctttgtttttt

SEQ ID NO: 18307 - DNA, 201 bp, Homo sapiens
cacgaggtcaggagatcgagaccatcctggctaacatggtgaaaccccgtctttactaaaaatacaaaaaattagctgggcgtggtggcgggcgcctgtartcccagctactcgggaggctgaggcaggagaatggcgtgaacctgggaggtggagcttgcagtgagccgagatcgcgccactgcactccagcctgggcga

SEQ ID NO: 18308 - DNA, 201 bp, Homo sapiens
ggctctggactttcctccaggagtttcaggagaaaggtagggcagtggttaagagcagagctctgcctagactagctggggtgcctagactagctggggtgcccagactagctggggtgcctagactagctgggtactttgagtggctccttcagcctggacctcggtttcctcacctgtatagtagagatatgggagcac

SEQ ID NO: 18309 - DNA, 201 bp, Homo sapiens
gaagaggaaggctctggactttcctccaggagtttcaggagaaaggtagggcagtggttaagagcagagctctgcctagactagctggggtgcctagactagctggggtgcccagactagctggggtgcctagactagctgggtactttgagtggctccttcagcctggacctcggtttcctcacctgtatagtagagata

SEQ ID NO: 18310 - DNA, 201 bp, Homo sapiens
tcatctcttcaaaaaatacacaaaaaattagccaggcatggtggcacgtgcctgtagtctcagctactcaggaggctgaggtgggaggatcactttgagcyttgcaggtcaaagctgcagtaagccatgatcttgccactgcattccagcctggatgacagagcgagaccctgtctctaaaaaaaaaaaaaccaaacggtg

SEQ ID NO: 18311 - DNA, 201 bp, Homo sapiens; identical to SEQ ID NO: 4407

SEQ ID NO: 18312 - DNA, 201 bp, Homo sapiens
gctctggactttcctccaggagtttcaggagaaaggtagggcagtggttaagagcagagctctgcctagactagctggggtgcctagactagctggggtgcccagactagctggggtgcctagactagctgggtactttgagtggctccttcagcctggacctcggtttcctcacctgtatagtagagatatgggagcacc

SEQ ID NO: 18313 - DNA, 201 bp, Homo sapiens
aagaggaaggctctggactttcctccaggagtttcaggagaaaggtagggcagtggttaagagcagagctctgcctagactagctggggtgcctagactagctggggtgcccagactagctggggtgcctagactagctgggtactttgagtggctccttcagcctggacctcggtttcctcacctgtatagtagagatat

SEQ ID NO: 18314 - DNA, 201 bp, Homo sapiens
aggccaaggcaggaggattcattgagcccaggagttttgaggcgagcctgggcaatgtggccagacctcatctcttcaaaaaatacacaaaaaattagccrggcatggtggcacgtgcctgtagtctcagctactcaggaggctgaggtgggaggatcactttgagccttgcaggtcaaagctgcagtaagccatgatctt

SEQ ID NO: 18315 - DNA, 201 bp, Homo sapiens
gtttaactggacatgaagaggaaggctctggactttcctccaggagtttcaggagaaaggtagggcagtggttaagagcagagctctgcctagactagctggggtgcctagactagctggggtgcccagactagctggggtgcctagactagctgggtactttgagtggctccttcagcctggacctcggtttcctcacct

SEQ ID NO: 18316 - DNA, 201 bp, Homo sapiens
ctctggactttcctccaggagtttcaggagaaaggtagggcagtggttaagagcagagctctgcctagactagctggggtgcctagactagctggggtgcccagactagctggggtgcctagactagctgggtactttgagtggctccttcagcctggacctcggtttcctcacctgtatagtagagatatgggagcaccc

SEQ ID NO: 18317 - DNA, 201 bp, Homo sapiens
gaggaaggctctggactttcctccaggagtttcaggagaaaggtagggcagtggttaagagcagagctctgcctagactagctggggtgcctagactagctggggtgcccagactagctggggtgcctagactagctgggtactttgagtggctccttcagcctggacctcggtttcctcacctgtatagtagagatatgg

SEQ ID NO: 18318 - DNA, 201 bp, Homo sapiens; identical to SEQ ID NO: 4408

SEQ ID NO: 18319 - DNA, 201 bp, Homo sapiens
aactggacatgaagaggaaggctctggactttcctccaggagtttcaggagaaaggtagggcagtggttaagagcagagctctgcctagactagctggggtgcctagactagctggggtgcccagactagctggggtgcctagactagctgggtactttgagtggctccttcagcctggacctcggtttcctcacctgtat

SEQ ID NO: 18320 - DNA, 201 bp, Homo sapiens
tctggactttcctccaggagtttcaggagaaaggtagggcagtggttaagagcagagctctgcctagactagctggggtgcctagactagctggggtgcccagactagctggggtgcctagactagctgggtactttgagtggctccttcagcctggacctcggtttcctcacctgtatagtagagatatgggagcaccca

SEQ ID NO: 18321 - DNA, 201 bp, Homo sapiens
actagctggggtgcccagactagctggggtgcctagactagctgggtactttgagtggctccttcagcctggacctcggtttcctcacctgtatagtagakatatgggagcacccagcgcaggatcactgtgaacataaatcagttaatggaggaagcaggtagagtggtgctgggtgcataccaagcactccgtcagtgt

SEQ ID NO: 18322 - DNA, 201 bp, Homo sapiens
aggaaggctctggactttcctccaggagtttcaggagaaaggtagggcagtggttaagagcagagctctgcctagactagctggggtgcctagactagctggggtgcccagactagctggggtgcctagactagctgggtactttgagtggctccttcagcctggacctcggtttcctcacctgtatagtagagatatggg

SEQ ID NO: 18323 - DNA, 201 bp, Homo sapiens
ctggacatgaagaggaaggctctggactttcctccaggagtttcaggagaaaggtagggcagtggttaagagcagagctctgcctagactagctggggtgcctagactagctggggtgcccagactagctggggtgcctagactagctgggtactttgagtggctccttcagcctggacctcggtttcctcacctgtatag

SEQ ID NO: 18324 - DNA, 201 bp, Homo sapiens; identical to SEQ ID NO: 4420

SEQ ID NO: 18325 - DNA, 201 bp, Homo sapiens
ggaaggctctggactttcctccaggagtttcaggagaaaggtagggcagtggttaagagcagagctctgcctagactagctggggtgcctagactagctggggtgcccagactagctggggtgcctagactagctgggtactttgagtggctccttcagcctggacctcggtttcctcacctgtatagtagagatatggga

SEQ ID NO: 18326 - DNA, 201 bp, Homo sapiens; identical to SEQ ID NO: 4421

SEQ ID NO: 18327 - DNA, 201 bp, Homo sapiens
gaaggctctggactttcctccaggagtttcaggagaaaggtagggcagtggttaagagcagagctctgcctagactagctggggtgcctagactagctggggtgcccagactagctggggtgcctagactagctgggtactttgagtggctccttcagcctggacctcggtttcctcacctgtatagtagagatatgggag

SEQ ID NO: 18328 - DNA, 201 bp, Homo sapiens; identical to SEQ ID NO: 4422

SEQ ID NO: 18329 - DNA, 201 bp, Homo sapiens
gggtgtccccttcctgtccccagacaaggatgaccagctgatctgtgtgaacgagaacggcggctgtgagcagtactgcagtgaccacacgggcaccaagygctcctgtcggtgccacgaggggtactctctgctggcagacggggtgtcctgcacacccacaggtgaccaggcttcatgtcccagtcccagatgacacca

SEQ ID NO: 18330 - DNA, 201 bp, Homo sapiens; identical to SEQ ID NO: 4473

SEQ ID NO: 18331 - DNA, 201 bp, Homo sapiens
cttaattctcccagaatgacgtgtgacgagacgtgggaagtactgccaacttgggaagctctacgagccccggtgtccagaggttttatcagggctcaatsacatagacccagctgaccacccgcatggctgacctcagtctcagcccctccagaggctacgccgatagtgcggcccaaggccccaccatacatcacattg

SEQ ID NO: 18332 - DNA, 201 bp, Homo sapiens
gtggtgcccacagctcacggcgctcccgggtgacggtcccctcggctgtagggcgtcctgaagagcggcctgctcggagctgagcgcacggggttgcctcsccctgggcgtctctggccctcaccagccccgtcttcccatgggcaaaacggcggtcctgtttgtccacaagtaaccgtcggggttacggaggggccagga

SEQ ID NO: 18333 - DNA, 201 bp, Homo sapiens; identical to SEQ ID NO: 4474

SEQ ID NO: 18334 - DNA, 201 bp, Homo sapiens; identical to SEQ ID NO: 4475

SEQ ID NO: 18335 - DNA, 201 bp, Homo sapiens
cactgtttcgacaaaatcaagaactggaggaacctgatcgcggtgctgggtgggtaccactctcccctgtccgaccgcggtgctgggtgggtgccactctyccctgtccgaccgcggtgctgggtgggtgccactctcccctgtccgaccgcggtgctgggtgggtgccactctcccctgtccgaccgcggtgctgggtgg

SEQ ID NO: 18336 - DNA, 201 bp, Homo sapiens
gtggtacgaggccagcttggagaactgtctcagctctctggtcctctcgtcagttgggtctctgattggaaagtcccttggacacttttaccatccccatkggactttcactttcccccaggctcccatcagctgctcggaagagtggtcaccctggaggccactgcccaccagccaggcaccccccaaatgcaaccgcag

SEQ ID NO: 18337 - DNA, 201 bp, Homo sapiens
tctggccgccggagacgcggtgcgggtggagacgagggatttggatttccgcgggcggctgcacggatttccacgcgcggttcacgtgggccccagggggktgcccggcacccggggccgcgccgccttctcctcgccggcatcgacccgcagcctcacgtttacgcggcggcgcccgcagcccccttcggcccggcttcc

SEQ ID NO: 18338 - DNA, 201 bp, Homo sapiens
cgattctttggtgtccccgcctgcatcctcagcctccttccaaaccagaccagttctctaggggcgtcgacgtgtgaaactgattttaaagaaaacaggcrgtggcctttctctcggccccacgtggcccagtagcgctcaccttccgtcccttcttccgcgctcagtaaccaatttaggccgctcctgcagaactcgggc

SEQ ID NO: 18339 - DNA, 201 bp, Homo sapiens
agagtccctgtgtccctgtcccacttccacatcccaccacgcaggaccgcttggtaaacttccccttctctactttccattacaaaggtttgaggggtttgttttttttttaaccatctgaatattaaattatcacaaagtttgaggcccccaacctcccttgggttcagtaattcactagaaggactcatagaatccact

SEQ ID NO: 18340 - DNA, 201 bp, Homo sapiens
tgcagcagccattttcttctctaagcagaagagagcccagcaagctggaggaggctgaagagagaggcttcctgctggtcatctgggtccagaatgcctgsagatctctgctcagccctggtgcccagcagccctggtgtgcatcctgcagggcaggccttcccgccggagtcctggacttgctcagggccactccccttg

SEQ ID NO: 18341 - DNA, 201 bp, Homo sapiens
gcaggggcagcactgcagagatttcatcatggtctcccaggccctcaggctcctctgccttctgcttgggcttcagggctgcctggctgcaggtgcgtccrgggaggttttctccataaacttggtggaagggcagtgggcaaatccaggagccagcccgggcttcccaaaccccgcccttgctccggacacccccatcca

SEQ ID NO: 18342 - DNA, 201 bp, Homo sapiens
gtggcctggccaaccgggctgcagggtgcacaacctggtggggtgtgtaggccgggcattcagggctcagccccagttggaaattggtctaggtgaccttkaaatcccttccagtctgaggtctttgacagggacccaaggttctgattatcagactcagtggccccttgggctcccggccctgggcaattctcagccctc

SEQ ID NO: 18343 - DNA, 201 bp, Homo sapiens
caagaatcacttgaacccgggaggtggaggttgcagtgagattgcaccagtgcactctccagcctggcaacagagcaagactctgtctcaaacaaacaaarcaaaacaaacaaaaagacgtaagatgtggaccgctggagaatgggggtgctgcctgcagtcaaaacggagtgggggtgcccagctcagggccagaatgat

SEQ ID NO: 18344 - DNA, 201 bp, Homo sapiens
ggaccgcttggtaaacttccccttctctactttccattacaaaggtttgaggggtttgttttttttttaaccatctgaatattaaattatcacaaagtttraggcccccaacctcccttgggttcagtaattcactagaaggactcatagaatccactgaagtggatacactcacaggtaccgtttattacagcaaaggat

SEQ ID NO: 18345 - DNA, 201 bp, Homo sapiens; identical to SEQ ID NO: 4476

SEQ ID NO: 18346 - DNA, 201 bp, Homo sapiens; identical to SEQ ID NO: 4477

SEQ ID NO: 18347 - DNA, 201 bp, Homo sapiens; identical to SEQ ID NO: 4478

SEQ ID NO: 18348 - DNA, 201 bp, Homo sapiens
atcaccaccagtcctgcctgcaacccttctcagcttactgacaccagcccactccacagatggggaccagtgtgcctcaagtccatgccagaatgggggcycctgcaaggaccagctccagtcctatatctgcttctgcctccctgccttcgagggccggaactgtgagacgcgtaaggccccactttgggtcccatattt

SEQ ID NO: 18349 - DNA, 201 bp, Homo sapiens
ccaccagtcctgcctgcaacccttctcagcttactgacaccagcccactccacagatggggaccagtgtgcctcaagtccatgccagaatgggggctcctkcaaggaccagctccagtcctatatctgcttctgcctccctgccttcgagggccggaactgtgagacgcgtaaggccccactttgggtcccatatttgcag

SEQ ID NO: 18350 - DNA, 201 bp, Homo sapiens; identical to SEQ ID NO: 4481

SEQ ID NO: 18351 - DNA, 201 bp, Homo sapiens
cccggtgtccagaggttttatcagggctcaatcacatagacccagctgaccacccgcatggctgacctcagtctcagcccctccagaggctacgccgatartgcggcccaaggccccaccatacatcacattgtcagctagaccatccagcatggctcaaggcccaggtaaacaccaacattccctcaggcaagaccttcc

SEQ ID NO: 18352 - DNA, 201 bp, Homo sapiens
tcatgtggacagtccttaattctcccagaatgacgtgtgacgagacgtgggaagtactgccaacttgggaagctctacgagccccggtgtccagaggtttkatcagggctcaatcacatagacccagctgaccacccgcatggctgacctcagtctcagcccctccagaggctacgccgatagtgcggcccaaggccccac

SEQ ID NO: 18353 - DNA, 201 bp, Homo sapiens
caccagggggtgaggtggcaggtggtggaaagggcctgaggggggcttcttccttccaggcgagcacgacctcagcgagcacgacggggatgagcagagcyggcgggtggcgcaggtcatcatccccagcacgtacgtcccgggcaccaccaaccacgacatcgcgctgctccgcctgcaccagcccgtggtcctcactga

SEQ ID NO: 18354 - DNA, 201 bp, Homo sapiens; identical to SEQ ID NO: 4483

SEQ ID NO: 18355 - DNA, 201 bp, Homo sapiens; identical to SEQ ID NO: 4484

SEQ ID NO: 18356 - DNA, 201 bp, Homo sapiens
atatctgcttctgcctccctgccttcgagggccggaactgtgagacgcgtaaggccccactttgggtcccatatttgcagagggccctggggagctggtgraggtggcctggccaaccgggctgcagggtgcacaacctggtggggtgtgtaggccgggcattcagggctcagccccagttggaaattggtctaggtgacc

SEQ ID NO: 18357 - DNA, 201 bp, Homo sapiens
gagaaccctgcgagatgccccatccgagttgtcacgtcgtcctcacggttactctttgaggtgggatctttgcctgatctttgcaaaatcaggagcattgratcaaagctatgtgaagatcctgtgaggtgaacagtgaaatctcacagcgacatttgtattcttgggccgtgcccaagagcacgtctcggctagagaggg

SEQ ID NO: 18358 - DNA, 201 bp, Homo sapiens
aaaactcgtaaaggctcctgggaaaatgggatgtttctccaaaccagcctggaacgaatgggctgcacttccaaaagcagggacaccccacacccactgtstctcaaagaggcggacgtgcccaccctggccacacagcctgggactcagcctgccacctcctcgggcttcctttctggcccaagaccttgattgaagcag

SEQ ID NO: 18359 - DNA, 201 bp, Homo sapiens
gtttgaggggtttgttttttttttaaccatctgaatattaaattatcacaaagtttgaggcccccaacctcccttgggttcagtaattcactagaaggacwcatagaatccactgaagtggatacactcacaggtaccgtttattacagcaaaggatgcaggcttaagtctgcagagggaccaggcacaagcttccccttg

SEQ ID NO: 18360 - DNA, 201 bp, Homo sapiens
ccccagacaaggatgaccagctgatctgtgtgaacgagaacggcggctgtgagcagtactgcagtgaccacacgggcaccaagcgctcctgtcggtgccaygaggggtactctctgctggcagacggggtgtcctgcacacccacaggtgaccaggcttcatgtcccagtcccagatgacaccagtccctgtcccactacg

SEQ ID NO: 18361 - DNA, 201 bp, Homo sapiens
aggcgagcacgacctcagcgagcacgacggggatgagcagagccggcgggtggcgcaggtcatcatccccagcacgtacgtcccgggcaccaccaaccacvacatcgcgctgctccgcctgcaccagcccgtggtcctcactgaccatgtggtgcccctctgcctgcccgaacggacgttctctgagaggacgctggcctt

SEQ ID NO: 18362 - DNA, 201 bp, Homo sapiens; identical to SEQ ID NO: 4487

SEQ ID NO: 18363 - DNA, 201 bp, Homo sapiens; identical to SEQ ID NO: 4488

SEQ ID NO: 18364 - DNA, 201 bp, Homo sapiens
tgtggggggaccctgatcaacaccatctgggtggtctccgcggcccactgtttcgacaaaatcaagaactggaggaacctgatcgcggtgctgggtgggtrccactctcccctgtccgaccgcggtgctgggtgggtgccactcttccctgtccgaccgcggtgctgggtgggtgccactctcccctgtccgaccgcggtg

SEQ ID NO: 18365 - DNA, 201 bp, Homo sapiens
agctggggtcacctgacctttctcctgtcccccccacttgagctcagtggctgggcagcaggggatgcatggccactggccggccaggtgcagctctcagstggggtgttcagaggacgcctgtgtcctcccctcccccatccctctgtcacccttggaggcagagaactttgcccgtcagtcccatggggaatgtcaaca

SEQ ID NO: 18366 - DNA, 201 bp, Homo sapiens; identical to SEQ ID NO: 4489

SEQ ID NO: 18367 - DNA, 201 bp, Homo sapiens; identical to SEQ ID NO: 4491

SEQ ID NO: 18368 - DNA, 201 bp, Homo sapiens; identical to SEQ ID NO: 4490

SEQ ID NO: 18369 - DNA, 201 bp, Homo sapiens; identical to SEQ ID NO: 4492

SEQ ID NO: 18370 - DNA, 201 bp, Homo sapiens
tctgtgtgaacgagaacggcggctgtgagcagtactgcagtgaccacacgggcaccaagcgctcctgtcggtgccacgaggggtactctctgctggcagayggggtgtcctgcacacccacaggtgaccaggcttcatgtcccagtcccagatgacaccagtccctgtcccactacggattatcttactggacaaaagacg

SEQ ID NO: 18371 - DNA, 201 bp, Homo sapiens
caccagtcctgcctgcaacccttctcagcttactgacaccagcccactccacagatggggaccagtgtgcctcaagtccatgccagaatgggggctcctgmaaggaccagctccagtcctatatctgcttctgcctccctgccttcgagggccggaactgtgagacgcgtaaggccccactttgggtcccatatttgcaga

SEQ ID NO: 18372 - DNA, 201 bp, Homo sapiens
ccctgaaaagtgagcagagggcggttttaagacgtaagccctctgtttcctccaaaaccagccctgaccattgtctcctcagccagccacttcttcaaggrcctctcatggccgggccccaccagtcaggcccagccgaggccctgccttccaccacccctgggccctgggagctcctgctcctgggggcctcccatagcc

SEQ ID NO: 18373 - DNA, 201 bp, Homo sapiens
cctgcaacccttctcagcttactgacaccagcccactccacagatggggaccagtgtgcctcaagtccatgccagaatgggggctcctgcaaggaccagcyccagtcctatatctgcttctgcctccctgccttcgagggccggaactgtgagacgcgtaaggccccactttgggtcccatatttgcagagggccctgggg

SEQ ID NO: 18374 - DNA, 201 bp, Homo sapiens
cttctcagcttactgacaccagcccactccacagatggggaccagtgtgcctcaagtccatgccagaatgggggctcctgcaaggaccagctccagtcctrtatctgcttctgcctccctgccttcgagggccggaactgtgagacgcgtaaggccccactttgggtcccatatttgcagagggccctggggagctggtgg

SEQ ID NO: 18375 - DNA, 201 bp, Homo sapiens
cctgtcccagtgaggacagggacacagtactcggccacaccatggggcgcccactgcacctcgtcctgctcagtgcctccctggctggcctcctgctgctyggggaaagtcgtaagtgcccctcgcccttcagacccaaaagcagcgccagggagcagggaggggcggcagttggggaaaccctctcatctctgcagcctg

SEQ ID NO: 18376 - DNA, 201 bp, Homo sapiens
cgtggtgcccacagctcacggcgctcccgggtgacggtcccctcggctgtagggcgtcctgaagagcggcctgctcggagctgagcgcacggggttgcctsgccctgggcgtctctggccctcaccagccccgtcttcccatgggcaaaacggcggtcctgtttgtccacaagtaaccgtcggggttacggaggggccagg

SEQ ID NO: 18377 - DNA, 201 bp, Homo sapiens
acggagcaggtggtgccaagctcaggctctgtcacccacagctcagtgccaccttccaggcagaacaccactgctgacccagggcatggccaccccggggrctggctctcgctgacccccagaagcccctctcagggtgtccccttcctgtccccagacaaggatgaccagctgatctgtgtgaacgagaacggcggctgt

SEQ ID NO: 18378 - DNA, 201 bp, Homo sapiens
gggatttggatttccgcgggcggctgcacggatttccacgcgcggttcacgtgggccccaggggggtgcccggcacccggggccgcgccgccttctcctcsccggcatcgacccgcagcctcacgtttacgcggcggcgcccgcagcccccttcggcccggcttccgcgcgtgcccccgagcgcgccctcgggatcagccc

SEQ ID NO: 18379 - DNA, 201 bp, Homo sapiens
gacacctcacagaggtcacctcacacccacaggacacctcacagaggtcacctcacacggggcacacttcacactcaggtcacctcacacccacaggacamctcacagaggtcacctcacacccacaggacaactcacagaggtcacctcacacaggacacctcacaaaggtcacctcacacccacaggacacctcacact

SEQ ID NO: 18380 - DNA, 201 bp, Homo sapiens
gacacccccatccaccaggagggttttctggcggctcctgttcaatttctttccttctagaaaccagcatccaggcacaggaggggaggcccttcttggtrgcccaggctttggcgggattatttttcaaagaactttaggagtgggtggtgctttcctggcccccatgggcccctgcctgtgaggtcggacaagcgcagg

SEQ ID NO: 18381 - DNA, 201 bp, Homo sapiens
cccgcagcccccttcggcccggcttccgcgcgtgcccccgagcgcgccctcgggatcagcccccggaagcagagaggccaggccgggaaggatgggcgacsggggtggctgacccgggagcacggcagggaggacacccagccaggcccgcgagcagcgccgctcccctcctccaggacgggcgggaacctgcgatgcccc

SEQ ID NO: 18382 - DNA, 201 bp, Homo sapiens
tcaccttccgtcccttcttccgcgctcagtaaccaatttaggccgctcctgcagaactcgggctcctgcccaccggcccacagcgtccacctgaggcctcktcctcccagcaaaggtcgtccctccggaacgcgcctcctgcggcctctccagagcccctcccgcgcgtcctctcagccccgctcgcctcctcccggggcc

SEQ ID NO: 18383 - DNA, 201 bp, Homo sapiens
ctgacccccagaagcccctctcagggtgtccccttcctgtccccagacaaggatgaccagctgatctgtgtgaacgagaacggcggctgtgagcagtactrcagtgaccacacgggcaccaagcgctcctgtcggtgccacgaggggtactctctgctggcagacggggtgtcctgcacacccacaggtgaccaggcttca

SEQ ID NO: 18384 - DNA, 201 bp, Homo sapiens
caaatctctgcatctttctgacttttgttttacacagttgaatatccatgtggaaaaatacctattctagaaaaaagaaatgccagcaaaccccaaggccraattgtggggggcaaggtgtgccccaaaggggagtgtccatggcaggtaaggcttcccctggcttcaggattccaagccctgagggtcttgaagcctttt

SEQ ID NO: 18385 - DNA, 201 bp, Homo sapiens
tgacttccacacctcctgtccccccgcccaggtcctgttgttggtgaatggagctcagttgtgtggggggaccctgatcaacaccatctgggtggtctccrcggcccactgtttcgacaaaatcaagaactggaggaacctgatcgcggtgctgggtgggtaccactctcccctgtccgaccgcggtgctgggtgggtgcc

SEQ ID NO: 18386 - DNA, 201 bp, Homo sapiens; identical to SEQ ID NO: 4500

SEQ ID NO: 18387 - DNA, 201 bp, Homo sapiens; identical to SEQ ID NO: 4501

SEQ ID NO: 18388 - DNA, 201 bp, Homo sapiens; identical to SEQ ID NO: 4502

SEQ ID NO: 18389 - DNA, 201 bp, Homo sapiens; identical to SEQ ID NO: 4503

SEQ ID NO: 18390 - DNA, 201 bp, Homo sapiens
ctctcgctgacccccagaagcccctctcagggtgtccccttcctgtccccagacaaggatgaccagctgatctgtgtgaacgagaacggcggctgtgagcrgtactgcagtgaccacacgggcaccaagcgctcctgtcggtgccacgaggggtactctctgctggcagacggggtgtcctgcacacccacaggtgaccag

SEQ ID NO: 18391 - DNA, 201 bp, Homo sapiens
ccgcgcctcggaccaggacggaggcctggggaaggcggatctggccgccggagacgcggtgcgggtggagacgagggatttggatttccgcgggcggctgyacggatttccacgcgcggttcacgtgggccccaggggggtgcccggcacccggggccgcgccgccttctcctcgccggcatcgacccgcagcctcacgtt

SEQ ID NO: 18392 - DNA, 201 bp, Homo sapiens; identical to SEQ ID NO: 4505

SEQ ID NO: 18393 - DNA, 201 bp, Homo sapiens
gatggggaccagtgtgcctcaagtccatgccagaatgggggctcctgcaaggaccagctccagtcctatatctgcttctgcctccctgccttcgagggccrgaactgtgagacgcgtaaggccccactttgggtcccatatttgcagagggccctggggagctggtggaggtggcctggccaaccgggctgcagggtgcac

SEQ ID NO: 18394 - DNA, 201 bp, Homo sapiens; identical to SEQ ID NO: 4507

SEQ ID NO: 18395 - DNA, 201 bp, Homo sapiens; identical to SEQ ID NO: 4506

SEQ ID NO: 18396 - DNA, 201 bp, Homo sapiens
cgggagatcttcaaggacgcggagaggacggtgagcccagcctcggggcgccccgcgccgcggacactgcaggcggcggtgaaccaggccgcgtggggccrcctgcgtctctttggctgcggctgtgggcggcgaacacgcagcggcgcccgcgcggcgctttctgcgggggtcgctttccgcccggggtgactccgcttt

SEQ ID NO: 18397 - DNA, 201 bp, Homo sapiens
gggcaggtcagccccaagcccaccaggctccaagtcagcacacctagcacctccagctcgcggcacccccatgcttttagtggggcaaggaaggagaaaasaaaacgacactcactgagggtctaccctgtgcagagaaccctgcgagatgccccatccgagttgtcacgtcgtcctcacggttactctttgaggtgggat

SEQ ID NO: 18398 - DNA, 201 bp, Homo sapiens
agatggggaccagtgtgcctcaagtccatgccagaatgggggctcctgcaaggaccagctccagtcctatatctgcttctgcctccctgccttcgagggcyggaactgtgagacgcgtaaggccccactttgggtcccatatttgcagagggccctggggagctggtggaggtggcctggccaaccgggctgcagggtgca

SEQ ID NO: 18399 - DNA, 201 bp, Homo sapiens; identical to SEQ ID NO: 4509

SEQ ID NO: 18400 - DNA, 201 bp, Homo sapiens
gcggtgctgggtgggtgccactctcccctgtccgaccgcggtgctgggtgggtgccactctcccctgtccgaccgcggtgctgggtgggtgccactctccsctgtccgaccgcggtgctgggtgggtaccactctcccctgtctgaccgcagctctcaagtgtctcaggggctgtggctctgggcttcgtgctgtcacttc

SEQ ID NO: 18401 - DNA, 201 bp, Homo sapiens
gcctctcagaggatgggtgtttctgaatctttcctagtggcacgttcatccctcacaaatctctgcatctttctgacttttgttttacacagttgaatatmcatgtggaaaaatacctattctagaaaaaagaaatgccagcaaaccccaaggccgaattgtggggggcaaggtgtgccccaaaggggagtgtccatggca

SEQ ID NO: 18402 - DNA, 201 bp, Homo sapiens
ggacactgcaggcggcggtgaaccaggccgcgtggggccgcctgcgtctctttggctgcggctgtgggcggcgaacacgcagcggcgcccgcgcggcgctytctgcgggggtcgctttccgcccggggtgactccgctttcctgggcgatgccccccacccccaggcacgcgctctccccgtgcggccgcaccgcgcatgc

SEQ ID NO: 18403 - DNA, 201 bp, Homo sapiens
ttgccccagaaggagactgcagcccctgcagacctagaaatggccacagcccatccccatgcaccagggggtgaggtggcaggtggtggaaagggcctgargggggcttcttccttccaggcgagcacgacctcagcgagcacgacggggatgagcagagccggcgggtggcgcaggtcatcatccccagcacgtacgtcc

SEQ ID NO: 18404 - DNA, 201 bp, Homo sapiens
tctcagaggatgggtgtttctgaatctttcctagtggcacgttcatccctcacaaatctctgcatctttctgacttttgttttacacagttgaatatccaygtggaaaaatacctattctagaaaaaagaaatgccagcaaaccccaaggccgaattgtggggggcaaggtgtgccccaaaggggagtgtccatggcaggt

SEQ ID NO: 18405 - DNA, 201 bp, Homo sapiens
gaggggggcttcttccttccaggcgagcacgacctcagcgagcacgacggggatgagcagagccggcgggtggcgcaggtcatcatccccagcacgtacgwcccgggcaccaccaaccacgacatcgcgctgctccgcctgcaccagcccgtggtcctcactgaccatgtggtgcccctctgcctgcccgaacggacgttc

SEQ ID NO: 18406 - DNA, 201 bp, Homo sapiens; identical to SEQ ID NO: 4512

SEQ ID NO: 18407 - DNA, 201 bp, Homo sapiens
aggatgggtgtttctgaatctttcctagtggcacgttcatccctcacaaatctctgcatctttctgacttttgttttacacagttgaatatccatgtggaraaatacctattctagaaaaaagaaatgccagcaaaccccaaggccgaattgtggggggcaaggtgtgccccaaaggggagtgtccatggcaggtaaggct

SEQ ID NO: 18408 - DNA, 201 bp, Homo sapiens
tcttccttccaggcgagcacgacctcagcgagcacgacggggatgagcagagccggcgggtggcgcaggtcatcatccccagcacgtacgtcccgggcacyaccaaccacgacatcgcgctgctccgcctgcaccagcccgtggtcctcactgaccatgtggtgcccctctgcctgcccgaacggacgttctctgagagga

SEQ ID NO: 18409 - DNA, 201 bp, Homo sapiens; identical to SEQ ID NO: 4515

SEQ ID NO: 18410 - DNA, 201 bp, Homo sapiens
ttggtgaatggagctcagttgtgtggggggaccctgatcaacaccatctgggtggtctccgcggcccactgtttcgacaaaatcaagaactggaggaaccygatcgcggtgctgggtgggtaccactctcccctgtccgaccgcggtgctgggtgggtgccactcttccctgtccgaccgcggtgctgggtgggtgccact

SEQ ID NO: 18411 - DNA, 201 bp, Homo sapiens
ggctggagtgcagtggcgcgatctcggctcactgcaagctccgcctcccgggttcacaccactctcctgcctcagcctcccgaggagctgggactacaggygcccgccaccacgcccggctcattttttgtatttttagtagagacggggtttcactgcgttagccgggatggtctcgatctcctgacctcgtgatctccc

SEQ ID NO: 18412 - DNA, 201 bp, Homo sapiens; identical to SEQ ID NO: 4519

SEQ ID NO: 18413 - DNA, 201 bp, Homo sapiens; identical to SEQ ID NO: 4520

SEQ ID NO: 18414 - DNA, 201 bp, Homo sapiens; identical to SEQ ID NO: 4521

SEQ ID NO: 18415 - DNA, 201 bp, Homo sapiens
acaaatctctgcatctttctgacttttgttttacacagttgaatatccatgtggaaaaatacctattctagaaaaaagaaatgccagcaaaccccaaggcygaattgtggggggcaaggtgtgccccaaaggggagtgtccatggcaggtaaggcttcccctggcttcaggattccaagccctgagggtcttgaagccttt

SEQ ID NO: 18416 - DNA, 201 bp, Homo sapiens
agggatttggatttccgcgggcggctgcacggatttccacgcgcggttcacgtgggccccaggggggtgcccggcacccggggccgcgccgccttctcctsgccggcatcgacccgcagcctcacgtttacgcggcggcgcccgcagcccccttcggcccggcttccgcgcgtgcccccgagcgcgccctcgggatcagcc

SEQ ID NO: 18417 - DNA, 201 bp, Homo sapiens
gaccgcttggtaaacttccccttctctactttccattacaaaggtttgaggggtttgttttttttttaaccatctgaatattaaattatcacaaagtttgrggcccccaacctcccttgggttcagtaattcactagaaggactcatagaatccactgaagtggatacactcacaggtaccgtttattacagcaaaggatg

SEQ ID NO: 18418 - DNA, 201 bp, Homo sapiens; identical to SEQ ID NO: 4523

SEQ ID NO: 18419 - DNA, 201 bp, Homo sapiens; identical to SEQ ID NO: 4525

SEQ ID NO: 18420 - DNA, 201 bp, Homo sapiens; identical to SEQ ID NO: 4524

SEQ ID NO: 18421 - DNA, 201 bp, Homo sapiens
gcccgcagcccccttcggcccggcttccgcgcgtgcccccgagcgcgccctcgggatcagcccccggaagcagagaggccaggccgggaaggatgggcgamgggggtggctgacccgggagcacggcagggaggacacccagccaggcccgcgagcagcgccgctcccctcctccaggacgggcgggaacctgcgatgccc

SEQ ID NO: 18422 - DNA, 201 bp, Homo sapiens; identical to SEQ ID NO: 4526

SEQ ID NO: 18423 - DNA, 201 bp, Homo sapiens
gaaatcccttccagtctgaggtctttgacagggacccaaggttctgattatcagactcagtggccccttgggctcccggccctgggcaattctcagccctsgagatggcccagctgagagtccctgtgtccctgtcccacttccacatcccaccacgcaggaccgcttggtaaacttccccttctctactttccattacaa

SEQ ID NO: 18424 - DNA, 201 bp, Homo sapiens; identical to SEQ ID NO: 4527

SEQ ID NO: 18425 - DNA, 201 bp, Homo sapiens; identical to SEQ ID NO: 4529

SEQ ID NO: 18426 - DNA, 201 bp, Homo sapiens; identical to SEQ ID NO: 4528

SEQ ID NO: 18427 - DNA, 201 bp, Homo sapiens; identical to SEQ ID NO: 4530

SEQ ID NO: 18428 - DNA, 201 bp, Homo sapiens
gaatggagctcagttgtgtggggggaccctgatcaacaccatctgggtggtctccgcggcccactgtttcgacaaaatcaagaactggaggaacctgatcrcggtgctgggtgggtaccactctcccctgtccgaccgcggtgctgggtgggtgccactcttccctgtccgaccgcggtgctgggtgggtgccactctccc

SEQ ID NO: 18429 - DNA, 201 bp, Homo sapiens
atggccttatgaccccggccaccttcctgccccaggcggggtcgctaaggcctcaggaggagaaacacgggacatgccgtggaagccggggcctcacagargtgagcagggactgccactggttttgtcctggggcccagtgggggccaacatcacctccttcccctcccatggcaaagagccagcccgcggggtggctac

SEQ ID NO: 18430 - DNA, 201 bp, Homo sapiens
atccctctgtcacccttggaggcagagaactttgcccgtcagtcccatggggaatgtcaacaggcaggggcagcactgcagagatttcatcatggtctccyaggccctcaggctcctctgccttctgcttgggcttcagggctgcctggctgcaggtgcgtccggggaggttttctccataaacttggtggaagggcagtg

SEQ ID NO: 18431 - DNA, 201 bp, Homo sapiens; identical to SEQ ID NO: 4535

SEQ ID NO: 18432 - DNA, 201 bp, Homo sapiens
ctcccccatccctctgtcacccttggaggcagagaactttgcccgtcagtcccatggggaatgtcaacaggcaggggcagcactgcagagatttcatcatsgtctcccaggccctcaggctcctctgccttctgcttgggcttcagggctgcctggctgcaggtgcgtccggggaggttttctccataaacttggtggaag

SEQ ID NO: 18433 - DNA, 201 bp, Homo sapiens
cccagagccaggtctgagcagctttgcctgggagggatctgcaaagaccccaggatttcagaaagaaattgtgcaatgccagaggttccttggcatgcccrggagggcgagtcatcagagaaacaatgacagcaatgtgacttccacacctcctgtccccccgcccaggtcctgttgttggtgaatggagctcagttgtgt

SEQ ID NO: 18434 - DNA, 201 bp, Homo sapiens
ggggcacgcggtgggcgcttcacggaactcgcatttcccagtcttcgtaacccaggaggaagcccacggcgtcctgcaccggcgccggcgcgccaacgcgytcctggaggagctgcggccgggctccctggagagggagtgcaaggaggagcagtgctccttcgaggaggcccgggagatcttcaaggacgcggagaggac

SEQ ID NO: 18435 - DNA, 201 bp, Homo sapiens
caacagccatcccagctggggcgtggactttgctccagcagcctgtcccagtgaggacagggacacagtactcggccacaccatggggcgcccactgcacmtcgtcctgctcagtgcctccctggctggcctcctgctgctcggggaaagtcgtaagtgcccctcgcccttcagacccaaaagcagcgccagggagcaggg

SEQ ID NO: 18436 - DNA, 201 bp, Homo sapiens
tcgcatttcccagtcttcgtaacccaggaggaagcccacggcgtcctgcaccggcgccggcgcgccaacgcgttcctggaggagctgcggccgggctcccwggagagggagtgcaaggaggagcagtgctccttcgaggaggcccgggagatcttcaaggacgcggagaggacggtgagcccagcctcggggcgccccgcg

SEQ ID NO: 18437 - DNA, 201 bp, Homo sapiens
gagctgcctaatgcacagctggacaggtgggggcagcagggctgtccaggacccccgggtctgtccaaaagcagaggcccagacaggacagaagccaggcmagcctggggacagcggaggaagaggaggcccctctggtggggacacgagagacagggaccctagacttgtttgcatcctggacaaagtggacaggcaggg

SEQ ID NO: 18438 - DNA, 201 bp, Homo sapiens; identical to SEQ ID NO: 4538

SEQ ID NO: 18439 - DNA, 201 bp, Homo sapiens
agggggtgaggtggcaggtggtggaaagggcctgaggggggcttcttccttccaggcgagcacgacctcagcgagcacgacggggatgagcagagccggcrggtggcgcaggtcatcatccccagcacgtacgtcccgggcaccaccaaccacgacatcgcgctgctccgcctgcaccagcccgtggtcctcactgaccat

SEQ ID NO: 18440 - DNA, 201 bp, Homo sapiens; identical to SEQ ID NO: 4540

SEQ ID NO: 18441 - DNA, 201 bp, Homo sapiens
cgtaacccaggaggaagcccacggcgtcctgcaccggcgccggcgcgccaacgcgttcctggaggagctgcggccgggctccctggagagggagtgcaagsaggagcagtgctccttcgaggaggcccgggagatcttcaaggacgcggagaggacggtgagcccagcctcggggcgccccgcgccgcggacactgcaggc

SEQ ID NO: 18442 - DNA, 201 bp, Homo sapiens
ggaagcccacggcgtcctgcaccggcgccggcgcgccaacgcgttcctggaggagctgcggccgggctccctggagagggagtgcaaggaggagcagtgcyccttcgaggaggcccgggagatcttcaaggacgcggagaggacggtgagcccagcctcggggcgccccgcgccgcggacactgcaggcggcggtgaacca

SEQ ID NO: 18443 - DNA, 201 bp, Homo sapiens; identical to SEQ ID NO: 4543

SEQ ID NO: 18444 - DNA, 201 bp, Homo sapiens
gagtcatcagagaaacaatgacagcaatgtgacttccacacctcctgtccccccgcccaggtcctgttgttggtgaatggagctcagttgtgtggggggamcctgatcaacaccatctgggtggtctccgcggcccactgtttcgacaaaatcaagaactggaggaacctgatcgcggtgctgggtgggtaccactctccc

SEQ ID NO: 18445 - DNA, 201 bp, Homo sapiens
attcactagaaggactcatagaatccactgaagtggatacactcacaggtaccgtttattacagcaaaggatgcaggcttaagtctgcagagggaccaggsacaagcttccccttgtcctctccctgtggggtcatgtggacagtccttaattctcccagaatgacgtgtgacgagacgtgggaagtactgccaacttggg

SEQ ID NO: 18446 - DNA, 201 bp, Homo sapiens
acctcctgtccccccgcccaggtcctgttgttggtgaatggagctcagttgtgtggggggaccctgatcaacaccatctgggtggtctccgcggcccactrtttcgacaaaatcaagaactggaggaacctgatcgcggtgctgggtgggtaccactctcccctgtccgaccgcggtgctgggtgggtgccactcttccct

SEQ ID NO: 18447 - DNA, 201 bp, Homo sapiens
cccagtcttcgtaacccaggaggaagcccacggcgtcctgcaccggcgccggcgcgccaacgcgttcctggaggagctgcggccgggctccctggagaggragtgcaaggaggagcagtgctccttcgaggaggcccgggagatcttcaaggacgcggagaggacggtgagcccagcctcggggcgccccgcgccgcggac

SEQ ID NO: 18448 - DNA, 201 bp, Homo sapiens
tcatatcattttgaggagatctttgatctactttgttcttaatttttgtatgcttatttttttttgccacacttcattttgtgactccaattggtgtattkgtttaagaacctacctttacatagggatcccagaaaatcaagacagttagctcaaattgcaaaaactctgaagtctgaattcagtctgtgcgaccaaagg

SEQ ID NO: 18449 - DNA, 201 bp, Homo sapiens
gagaaattggccaaaacagaggggctgtaggccccatgcaagtctacaatccagcagggcagtcaaatcctaaagttccaaaattatctccattgactccrtgtctcacatccaggtcatgctgatgcaagaggtgggttcccatggtcttgggcagctctgcccctgtggctttgcagggtacagccaccctcctggctg

SEQ ID NO: 18450 - DNA, 201 bp, Homo sapiens
tgagcctcagtttcttcatctgttcttcacctgtaaaatagggatagtacatcaaacataagggctccagaaatatcagcagtcccctttcagcgtgcttkgtacttacatttaatgggaacaagtcttttgttcccccagcccccctctttttttcaattcttttaaagctgttgattctgcaggacattgtgtatgttt

SEQ ID NO: 18451 - DNA, 201 bp, Homo sapiens
atagaatagctaactttccttgagtccttattatgccccaggcacttttcttaatattactttcttaaagctcgaacaattctctaaagatggctcttatrtttgaggaaactgagactcaaagaggtttacttgcccaggttggacaaccacaaagtcgtagaaccatgaaaaaatagctggtgaggccagccacggtgg

SEQ ID NO: 18452 - DNA, 201 bp, Homo sapiens
tggaagcccccagccccctccaccatcacagcagtgtgggcagcgctggattgtgacagtggcctgaactgcggcagctggatttagcaaagccagggcayagcccagcgcagaggttcctcgctcctgggtgaagccggaaattcctggcaggttcagtggcgttgcaccaacgtgtcaagctgtgatctgtgctctctt

SEQ ID NO: 18453 - DNA, 201 bp, Homo sapiens
cattcagagctcataagtgtccagccctgaagccaggccttgtgctgctgctatggtggtcagttgattgctaacttcaccatcctcagccaacagtgacygagcagctgctgtcctcagccctgtgctggggatgagacagggattctgagttaaatcggacatgcttcttgttcccagcacagtctagtcccgtgcaac

SEQ ID NO: 18454 - DNA, 201 bp, Homo sapiens
cccacccgtacaacaagctctggagcctgggccaggacgacatggccatccccagcaagcccccagctgcctcccctgagaagccctcggccctgctcggraactccctggccctgcctcgaaggccccagaaccgggacagcatcctgaaccccagtgacaaggaggaggtgcccacccctactctgggcagcatcacca

SEQ ID NO: 18455 - DNA, 201 bp, Homo sapiens
tctagcttggcatttattttctttcaggatctttaaaatatcatctcattgtcttctggcttacattgtttctgctggaaagtcatctgtaagtcttatgsgtgttcctttaatggcaatttttttttcttttttttttttggctacttttaagtttttccttttcatttttaatttttagcagttgcactatgattagtg

SEQ ID NO: 18456 - DNA, 201 bp, Homo sapiens
ttctaattatataggtaagaaaaagagggctccatgagcgcagagattatgtcttgcttgcacttgtatgctttggtagctagaagagtgcctggcatacrttaggccctcaagtatttaatgattaaatcttagagctaggaagcaacttgtccaaagaacagagtgacagagttgggatttgaattctagtgtgactgt

SEQ ID NO: 18457 - DNA, 201 bp, Homo sapiens
agaccagacagtgaaggggggaaatgcctgacaagttcatttttctttcttggactgaatattgaagattcacttcagaacaatagcagaacacattgacrgcttgaaatcggtacccttgttgcctcagtttccttttaagaaaaatctaattccaccctatctgccaagctgatgtgattggaatcctgagacgtggtg

SEQ ID NO: 18458 - DNA, 201 bp, Homo sapiens
ccttttgagcagtgagtttgttgaatttttaaaattccctccacatgccaatctcagagcctcattttctcaactctaaaatggggcactaatagtacctrttttagttgaaagattaaatgggagtgcaccatgcatgggacatggaaagttctttataaatgggagctgttattttaacttacttttgtttaaagcaag

SEQ ID NO: 18459 - DNA, 201 bp, Homo sapiens
tagtaccttagatatagattgggaggtatgctggtgttattaaaaaatcagatgaactctataaacacccatttggaaaaatagctattttgacatctttmttttctttactttttggctttctcagttttgaagctacccaatgtattttgagtttaaattacatatattggtgaaaaaaaaaagttaacagtatgtagt

SEQ ID NO: 18460 - DNA, 201 bp, Homo sapiens
aagtgctgggattacacttgtgagccactgtgcccggccctcttttccctgttttgaagggaaaactttccacatttcacctttcagtaccacggtggctrtaggtttttttaattgagttttttgattgatttataactcacatatagtaaaatgaacaaatcttaagcatacagtttgaattttgaaacatgtatacac

SEQ ID NO: 18461 - DNA, 201 bp, Homo sapiens
ctctcatttgcttactagaaagcttaggtgcagaaaaatatataggctatttctttttcccagttaaataattacatcaaacatggaggcacattcaggamtatttactgctagtgaagctcatgatgacttttttttactaaccatttctgaaattcatgtattatgcctaaaaaagctcagagtaggtcttgggaatta

SEQ ID NO: 18462 - DNA, 201 bp, Homo sapiens
atattcgtcttccaagagatgatgatgcttttctctcatttgcaatgttttttgacagatcttttatttttcacttgctttcttgagtaaggagagctctrtctagatttgctgttttgccacaggtggttgaatgggttaccatgggcactgttctttgtgcttgcgagtgatggtcagatccccttctcagatctgtgg

SEQ ID NO: 18463 - DNA, 201 bp, Homo sapiens
tttccagttgcacaaggtcacagagctatcaagtgtggaatgaataaatttacatcattatgttatttaatcctctccataatcctatgaagtaagtattkttatcactgccctttacaaatgaagtgactgaagtcagagatgttaggccgtttgtgtggtggagctgcaactggagcccagatcgatgtgattctaagt

SEQ ID NO: 18464 - DNA, 201 bp, Homo sapiens
gtatttttatcactgccctttacaaatgaagtgactgaagtcagagatgttaggccgtttgtgtggtggagctgcaactggagcccagatcgatgtgattstaagtgtattttgtcttccatgctagtctgaccgcagcctcattgatagcacccctcacctctcaccttaatcacacgtgtagattcccttgtttaactt

SEQ ID NO: 18465 - DNA, 201 bp, Homo sapiens
gatgttaggccgtttgtgtggtggagctgcaactggagcccagatcgatgtgattctaagtgtattttgtcttccatgctagtctgaccgcagcctcattsatagcacccctcacctctcaccttaatcacacgtgtagattcccttgtttaacttctgctcattctttaggtttcagctcaattagagctctggctgaga

SEQ ID NO: 18466 - DNA, 201 bp, Homo sapiens
tgagagggaattgtcattgataagggcctctttgttccgggtcctatgtagacatcatctcattggaccctcaccacagccctgcaaggaggccaatggarctatcctcatcttgcagatgaagaaaccgagctttccaggagcacccttctgatttgaataggccacagaattccagttaatgtgtctgtctgctgccta

SEQ ID NO: 18467 - DNA, 201 bp, Homo sapiens
tttgacaatgtcattcatatctcatgaaaaactacctcagacaggttaaatgtgttaaaacatggaacgaaaaggatggaaggagacccagtgctgcctaraaaccttgatcttttgccaaagtatttaaacaatttagtgttttggtttcctagctccaagctgcttctcaaatcccttgctaattaatccagttaatgc

SEQ ID NO: 18468 - DNA, 201 bp, Homo sapiens
atacaccagcaagatgaaagaaaattttagaaaaaggagtcagctacagtccccttatatggcagcatgtcattttcattaattgttcattttttttttttacagtgccaatgcacatttcatttattcctgtagtcgcacagtcaattataaatagctttccatttgattgtgtgttatgaacattttgcaggtttctac

SEQ ID NO: 18469 - DNA, 201 bp, Homo sapiens
atggcatctgactgggatcattgatttttttgtttattactgcaagtaggacacggatcctcatgtagccatttcttccttttgttgtgttttttttttttctagtagagacagtgtatttcctaggctatgaaagctccagtagggtgggccttagttagaacctcactaacccattacattatattacagtagtaattt

SEQ ID NO: 18470 - DNA, 201 bp, Homo sapiens
tgattagatactttatcaagaaacttactgcacattcattttcccctttgttctgcctttgctgcagcctcacagttagccaagttggccagaacttcacrttcgtgctcactgacattgacagcaaacagagattcgggttctgccgcttatcttcaggagcgaagagctgcttctgtatcttaaggtaagggagaaggc

SEQ ID NO: 18471 - DNA, 201 bp, Homo sapiens
ctgccttaagctaataaaaagtttaagcctggacgttttcgatggttcatcctttatctctgacaaatatctgactgtatgtttcatgggagaacatgggyagctgaatttaagtaagtttattttgaaacctcacctttcattaaaagtaaaagaggaaacaccctatctcttatttcgttgtttctgacccagaaaact

SEQ ID NO: 18472 - DNA, 201 bp, Homo sapiens
tttacttttttaagtggttttaagtatattcacaagggtgattgattaccactaattccagaactttttcatcaccccagaaagaaaccccatgcctgttrgacactcctcattcccccaaacccttcagtcctaggcaatcactaatctacttgctatagatttgccttttatgggcatttcatatattaataaatagaa

SEQ ID NO: 18473 - DNA, 201 bp, Homo sapiens
aaattgtttcctaaagcagctgtaccactttgtgtaaagtggtattttattgtggttttgatttggcccaaatgagttacatagaaaagatcagtgtagayggagataggtttctaggaagaggttggaacttgaactgaaagaaaggggagatttggagaatggagggggattaccaaaggaagacaagtggaagttata

SEQ ID NO: 18474 - DNA, 201 bp, Homo sapiens
cgcccaccacagtcacaccagtgtggaagcccccagccccctccaccatcacagcagtgtgggcagcgctggattgtgacagtggcctgaactgcggcagytggatttagcaaagccagggcacagcccagcgcagaggttcctcgctcctgggtgaagccggaaattcctggcaggttcagtggcgttgcaccaacgtgt

SEQ ID NO: 18475 - DNA, 201 bp, Homo sapiens
taaatgttttaggaagacattttatatgtaaaacacatataattgccttctgtgtgtgtgtgtgtgtgtgtgtgtgtgtgtgtgtgtgtgtgtgtgtgtakagagagaggggggaagagaaggataaagccaatgtggtaaactgttaacattttgggtaatctgggtgaaaggtcggtggtaattctttctattattctt

SEQ ID NO: 18476 - DNA, 201 bp, Homo sapiens
ttcttataatttgtttttaatgtatctattacttgtctcaaatagttcagtaacattttttaggtcctcataccacccagcttgggcaatatagacaaagrtgagggtgacacatacattactttgtcattcattcatttgtttaaaaaaatattgcattggtcatatgttatttgacaggggaactcacaggcctataag

SEQ ID NO: 18477 - DNA, 201 bp, Homo sapiens
tttgagacgtcaagtggagatgttgagtagacagttagataaatgagtctagaattggaagagataggagctggagaaataaatttaaaattgatagtgcrtatttgaagtgatgggactgaaagaggaccagcaaaggaaagaaagtcaagtccaaggactgagttctggagctcttcaatagggagagatcagcaagga

SEQ ID NO: 18478 - DNA, 201 bp, Homo sapiens
agccagggataggtgagagggaacatcctccaggcagaaggagaagcagacacaagggagggtgtggcaagagatgaacctgaaaggcagtcttggaccakatcagagaggaccttataagctacatcatgaagcttaaaatgaatccttaggtcattggacagctgtggagaaagagtttgtaagggagggaagttatat

SEQ ID NO: 18479 - DNA, 201 bp, Homo sapiens
tcatctctgctcactccttgggtcctgaggtcactagctgttctgcttctctctctgcctttcagaaccatcttatgtttgtcttatatgtaatgtgcagrgttttttgttatttctaatgtagattttcttctgccattacacatatttttaaacttaaattttttgctgttatatcatttacatacagtaaagtacaca

SEQ ID NO: 18480 - DNA, 201 bp, Homo sapiens
tctggaggcacacaggtagaggaaagcttgcaaagtgttcgatggaatatttgagtgttggagaggcactgtgtgtgcactgtagtttggtactggctaargaaggttgagattccaggagagctactttttcagagctatgaaactttgggaagccctccctcctccctgaaccgcaggtttttcatttgttaagtgggg

SEQ ID NO: 18481 - DNA, 201 bp, Homo sapiens
ttaatgtcatgttttcgtagctcattgtggttttaatctgcatttccctgatgactgattactcatgttaagcaccttttcatatgcttcttggccatttrgatatcttcttttgtgaggtacctattcaggtcttttcctgtttttcactatgttctctgttcttttcttactgattggtaggcattctttatattattg

SEQ ID NO: 18482 - DNA, 201 bp, Homo sapiens
gaggaccacttcagcccaggagtttgaggctgcagtaggccaagatggtgccactgcattccagcctgggcaacagggtgagaccctgtcttttaaaaatrttgagcggattagtttaaaataatgactgcaaagtacatatgagcccaagaaatagggaggaggcgttggctgcatcggggggaggatggtgccttgagt

SEQ ID NO: 18483 - DNA, 201 bp, Homo sapiens
tgctgctttgctggttgctagaatctgaccaaagctttcccccaccccacgtctactgatattggacttggggtcaggggacagtgtgctagagagaattyttagtagcacctgtgaccagcatccagtcattcatcccttgtgcttttcaggagttgtttgtccatccctgttctgtcttgggccacttggcgacactgt

SEQ ID NO: 18484 - DNA, 201 bp, Homo sapiens
agggatgcatccagaaggtattttctatccttcttggtggtgggatggtcaggaaggagaagggaaaggtgacagcaatgacagttccagacagaggatcmggtggcttgtaaatgaagttccacccatacacaggggcagtgaagtagagcagttagaatgtgacacctctacttcctgcttacttgatcgtgggcaagg

SEQ ID NO: 18485 - DNA, 201 bp, Homo sapiens
ccagcatttaaggtagtgtagttagagaaccattaaattaattgaatatgggggagagaggagaagctgaaatgaaaggtgatgatatcaaggtttccaayttgggcctcataatacccttcatagacactggcgagtcaggagggagaactggcattgaggtcgagaaggatgaatttggttgattgtaaactaatgata

SEQ ID NO: 18486 - DNA, 201 bp, Homo sapiens
agtcctggctacttgggaggctgaaggggaagaattgcttgagccaggaggttgaggctgcagtaagctgtgttcatgtcattgcactccagtctgggctrcagagtgagaccctgtctcaaaaaataaaataaaaaataaaatgtatcatattatatgtacatatgagaccctcataactcaataagacaatccaataaa

SEQ ID NO: 18487 - DNA, 201 bp, Homo sapiens
atgtgtgagaaatataaataagcctttattctaacatttgtaagtagctttaagaggggatagaatgggaactgaaagtctgagtttgggcccagactacmagactttgattggaatgtggcccatgtcttgagtttgttgctaggtatgtagcctaacctccctgaggctgttttacccttgtaagatgggaacattaat

SEQ ID NO: 18488 - DNA, 201 bp, Homo sapiens
cagtgttgaatagaagtggcagaaatgaatattcttttcttcatccgcatcttaaagagaaacatttagtcttttggcataattatgatattaattatatsatttttttagatgccctttatcagcttgatgaagttctgttttgtttctagtttgtttaattttttttattatgaaaggatattggattttgtcagatgc

SEQ ID NO: 18489 - DNA, 201 bp, Homo sapiens
tagtaatacatgctataaaatgatgtgctggcatccaggctttgttccatttatagagcacaggcaaagtagatttagcgtaatattatacttaagaaccytaggattttcagaatggtcgatgagcattggtttgaatttaaagtcaccagctgcattagctcctaacaaaagattcatcctgtcctttgaagctggttt

SEQ ID NO: 18490 - DNA, 201 bp, Homo sapiens
aagggagatgcattttttataacaatgaatatttaatttccacatcacagatgaaaaagactctctgaagaggcatctgagggaagctccagagagcagcygctaatcagaaaagggccttctcgcgagagctcttccgcacggctcacttttttcttgaacttttttattttttatttcttcctgcttattggaatagat

SEQ ID NO: 18491 - DNA, 201 bp, Homo sapiens
gccaggccaagagcttagaggaccttcgtgcccccaaagacctgagggagcagccagggacctttgactatcaggtatggcatgggcaagggagggtatckgccgggggccggcactgtccgcacacgaggtgggatccccatgtgacagtggaagagactaagggagaaacagtgactttccaagaccctcagccaatgc

SEQ ID NO: 18492 - DNA, 201 bp, Homo sapiens
catgttgactttgtcaggctcatgtagagggaatggacagagctctgctcttagaattgtctggtgagtttctccagcaggtaggcattgcgttctgtctygaagtgtgtcacttactgttggtcccctcatattttgggtccatgtcattctcaccacttggatctttgagcagggaaggtgagaaacttgaggcctagg

SEQ ID NO: 18493 - DNA, 201 bp, Homo sapiens
gacttgagttcagatctctaactctgtaacgtattatctgtgtagcagtaaaagcaagtcaacgatttgagctttggttctgtatcttcttatacacatgraataagagttaccgcctcgcacggttcttgtggggcaggcctccacaagatgaggaatgtggagcgctgagcagagcacatggcatgctgttggggatta

SEQ ID NO: 18494 - DNA, 201 bp, Homo sapiens
caggtgtggtggctcacatctgtaatcaaagcactttgggaggtcaggcaggcaaatcacttaagaccaagagttcaagaccggcctggccaacatgacaraaacctttctctactaaaaatataaaaattagcctgtaatcctagttattcaggaggctgagacgcaaggatcacttgaacctggcaggtggaggttgca

SEQ ID NO: 18495 - DNA, 201 bp, Homo sapiens
ctagtctatatcaagaggtggattttcacagtcatcatcaaatcacccgttaacattgacatcttgctgtctcgtgtgttgttttaagatttttctttttsaaactaggacttaggaaaaataataaagccagtagcttttcaaaagaatgtgcttcctcatatattatctcattttatcctcctatcataagagataaga

SEQ ID NO: 18496 - DNA, 201 bp, Homo sapiens
gcaaaaactctgaagtctgaattcagtctgtgcgaccaaaggtctcggaagagggtgctcttgtaagagagatcagcctgcaaggtcccatgatcagatgrcactggccacacaaaaactctggaatgcatttcaaacacaagtgtctcattacagctggcatcttagcctgcagcgggcactcttcttgggcagatgctt

SEQ ID NO: 18497 - DNA, 201 bp, Homo sapiens
tttttttttttactttataaaactaatgtattaactatattaataaaataacaattattttattttcaaaaaatgtctactctttttcattacagttgaakcattagttttttacattcatttatttgcccatttgattgttgtctcttcagttttctcttaatggaaatttgaactatgaaactgtacatacattacatc

SEQ ID NO: 18498 - DNA, 201 bp, Homo sapiens
gcagtgagccaagattgcaccacttccctccagcatgggcaacacagtgagaccctgttttgttttgtattttacaaaacagaacaaaaaagaataggaamccggagctggagaggtagttcagaagtgaacacttgaatttgagagtcatttaccttgtgctgttaattgaaactaaggtataggtaaactgctaataga

SEQ ID NO: 18499 - DNA, 201 bp, Homo sapiens
agctaggtaggacaaaccaagacatacctttattaaatcccattttacctagagaggcttaaccagatgtgtttatgattctcatatttgagtgtatatcrgacatgatgcctctttgtgtagtatctagttttagcggtataacttgtaaagcgttgagaacattttttatcagagcactcttccaacctgccagatact

SEQ ID NO: 18500 - DNA, 201 bp, Homo sapiens
agtcactgttgattcttgggtttttcaacctcttgcccaaaaggctcactttccgtatttcttagtaacttggcagtctggaaacgtaggtggaaatgtarttttttcatctgcaggtataaactctcaatctctttagactattcggcctaagagctgattgttagcatgatagccacagggtgctctgctgaagcgggt

SEQ ID NO: 18501 - DNA, 201 bp, Homo sapiens
ctaccattgtggcatggttaccatatgcaacacagattcattttatgaggagttaatgttacatttttctcctaatctcatatattctaattgaggaaaaktagatcctaattaaaagctgatgatccagcagagtgatcaatagcatgatgccttgaaaaaaaaaacaaaacaaaaaacgccattaagctttgctgctgc

SEQ ID NO: 18502 - DNA, 201 bp, Homo sapiens
cgtgccactgacccacctctcccctctgcacttcccaggaggagccgatcactttctgtgaggaagccttcgtgtcccactaccgctccggagccatgagrcagttcctgcagaacgccacacagctgcagctcttcaagcaggtgcctccctccctggtctggcctgggtctggctccctggcggggatttctgcagctg

SEQ ID NO: 18503 - DNA, 201 bp, Homo sapiens
tcatggcttcaagctgagtgtacttaatctttttgagaacatggtcctggctgggtgtggtggctcacgcctgtaatcccagaactttgggaggctgagaygggcagataagttgaggtcaagagttcaggaccagcctgggcaacatggtgaaaccccatctctcctaaaattacaaaaatcccggacatggtggcaggt

SEQ ID NO: 18504 - DNA, 201 bp, Homo sapiens
ttgagcaaagaagtgacataacctgaacttcagaataaaaggattactgtctgttaatgttgtgatctgactctatagaggggcaaggaagaaagcagggrgacccatcaggagggtgctgcagtaatcgaggtgatatgatagtgatctatcaaggatggttgtatttgggggtgctgagaaacgttgagattctggatg

SEQ ID NO: 18505 - DNA, 201 bp, Homo sapiens
ctttctgtgaggaagccttcgtgtcccactaccgctccggagccatgaggcagttcctgcagaacgccacacagctgcagctcttcaagcaggtgcctccmtccctggtctggcctgggtctggctccctggcggggatttctgcagctgtctccactctaagtactgaggccgcaggcatggatgggactcaggccccag

SEQ ID NO: 18506 - DNA, 201 bp, Homo sapiens
gccagggaaaccacagacccctttcttttaactctttccagctttgcccttatggtaggttgtccttgagtcttttcccgggtccctggtttgatgggctsttgaccgtaagaagtacggtttctagagcacctactaccggcaggcatgagttttaaggacttgatattcttcccaaagaacagtctcttgagtttcatt

SEQ ID NO: 18507 - DNA, 201 bp, Homo sapiens
attgtttgagatagctatgcacgtgagataatatgtgaatatgagtaaattgttatttgtctttaagtatgtttaagtgcctttttccttttattcatgcycacattatcctaggaagaatggagaatgaaaacacagtgaatagtctgaattaagagttcaagcataataggcttgaagtatggctttattcattgtaat

SEQ ID NO: 18508 - DNA, 201 bp, Homo sapiens
tataatgttatccagttcttcagaaatactggtcctggcaagagggacccctgccttggcctgatgctttagaaggatctgctttgtccctcctctaccartgccctttccacagggcaaggagtctctggggcctacggaacatggtcacttggagactaaacccttccatcctagaccatgctttgagcacccagcatc

SEQ ID NO: 18509 - DNA, 201 bp, Homo sapiens
tataattgaattgtgccgccttctgaattttatagaaatggaattattctgtatgtagctctgctgcttttttgctcaattatgtttgaaagggtcttccrtgttgtgtgtaactgcagtcatagattttcattgctgtgtagtgtactatagaattatttcagaatttagttatccattctactgttgacctttgaagtt

SEQ ID NO: 18510 - DNA, 201 bp, Homo sapiens
cattctactgttgacctttgaagttgttcgcagtttttggctactataagccatgctactgtgacctttcctacgtatgaatcctggcacatgtaaacatmcatttccatatagaacatacttgattactgaatcatgccatacttttacaaaatggattgtgccagtctgtactcccacctgcagtgtttggtagtctac

SEQ ID NO: 18511 - DNA, 201 bp, Homo sapiens
ttaaatgttttaggaagacattttatatgtaaaacacatataattgccttctgtgtgtgtgtgtgtgtgtgtgtgtgtgtgtgtgtgtgtgtgtgtgtgtrgagagagaggggggaagagaaggataaagccaatgtggtaaactgttaacattttgggtaatctgggtgaaaggtcggtggtaattctttctattattct

SEQ ID NO: 18512 - DNA, 201 bp, Homo sapiens
gccccttgaagatttgtcttctctcatctgtttctattggcaaacagtctgttatcaatccagtcatcattcttttatgaaaaatccatcttttctctccrggaactctgaagatgttctctttcgccttatattctgtgattttaccctgctgcatctaagtagatttatttatcatacttgatacctagggctcatgtc

SEQ ID NO: 18513 - DNA, 201 bp, Homo sapiens
atcatctttcttgcttaatgtacttgggctcaaatcgaggatcacacattgcctatggttgttatgtctctttagtaccgtttcatgtaggatagtctctsttgctttttgttatgttttggtcttccaaggcatttacatttttgaagagtccagaccagttgtcttgtagcctaccccacaatgtgattatgtgactgt

SEQ ID NO: 18514 - DNA, 201 bp, Homo sapiens
tgggtcctggttcccatgcagcctttccatagaaatagaaggtgtgcttagaaggacagcttgcctggtttcagatcttggctctgctgctcacttgcagygtgacctcgaacacgtctcctcctttttcggagcctcagcattcttatctatcaagtagagtgactatgcctgtttcccaaggtagtcagagaagctagt

SEQ ID NO: 18515 - DNA, 201 bp, Homo sapiens
agcattaaggtcagaattgtaatgcaaaatgtctagctccaaagtccttgctcttaatcaccatactgtgtgggctctcggaggtgtttggtgaatgcttrtcatttctggaaactttcggctcaggcgcatgaagggggcacactcactcacgttgaggagcagcggcacagaggatggcattgctagcctgctcctctt

SEQ ID NO: 18516 - DNA, 201 bp, Homo sapiens
tcctaccttggatacagtaaggtgcccagctgaatggtttttcccccttttctttgtacgagctgttgtgcttttgttccttctttctatagtttattgayggtcgattagatcttctcaattccggcgaaggtttcagtgatgtttttgaagaggaaatcaacatgggcgagtacgctggtgagaagcaactcattttcc

SEQ ID NO: 18517 - DNA, 201 bp, Homo sapiens
ttccctccagccagggaacaggtgccaagcagagcactgagtctagagtctccttccatcaattcacactcctcatccccagtccatacacacccacccasagctcccaccgagagtccttctgtcatgaccataactgactggcagggaccagttatcatccaggcctatttctcgatgtgcatttacatacctttgaaa

SEQ ID NO: 18518 - DNA, 201 bp, Homo sapiens
cagcctgtgatgcagttccctccagccagggaacaggtgccaagcagagcactgagtctagagtctccttccatcaattcacactcctcatccccagtccrtacacacccacccacagctcccaccgagagtccttctgtcatgaccataactgactggcagggaccagttatcatccaggcctatttctcgatgtgcatt

SEQ ID NO: 18519 - DNA, 201 bp, Homo sapiens
atttttgtagagatagggtcttgccatgttgcccaggctggtcacgaactcctgggctcaagagatcctcccacctcagcctcccaaagtgttgggattayaggcatgagccaccgcacctggcctggaccctgattcttgatactatagttgggacaaattgccactcactcaaaagacatggattgttaaaaacatttt

SEQ ID NO: 18520 - DNA, 201 bp, Homo sapiens
gctcaagagatcctcccacctcagcctcccaaagtgttgggattataggcatgagccaccgcacctggcctggaccctgattcttgatactatagttgggrcaaattgccactcactcaaaagacatggattgttaaaaacatttttgtaaattttcctggctctgagtacttgacatgctagttagaaaaagtcttgttt

SEQ ID NO: 18521 - DNA, 201 bp, Homo sapiens
gtgcaatcacagctcactgaggccttgacctccagggctcaagcaatcctcccacctcagcctccccagtagctaggactacaggtgtgcaccaccacgcstggcttttttttttttttttggagagacaggtctcagtatgttacccaggctggtcttgaactcctgggctcaagcaatcctcctgcctcggcctcccaa

SEQ ID NO: 18522 - DNA, 201 bp, Homo sapiens
acattgtggagaaaattaaattctatatattgtagtatgcagtggaaattaagtaggtttttattttctactcatggacttgaatctaccagtgatcttaygcaaaaccaagggcaattgttgtgctttagctcaatccacaagtcttaaactaccacatagagattttaaatcccttatctataatacaaagcaatattt

SEQ ID NO: 18523 - DNA, 201 bp, Homo sapiens
ctgtgccatcaaaatgcagaaaataaaatctctgcagcctctttaagggtttttttttaaccttttaccgttgtatttgttttcatagccattatgttttygacttgatgatcccatttttccttcctttttctagtaatcagagaaggtgattctcgatggactgaaatcaagcatagtccctgctggaaacagaaaggg

SEQ ID NO: 18524 - DNA, 201 bp, Homo sapiens
tttaacttacttttgtttaaagcaagagtttatatctgtgtggaactctgctactcagcaactgttatcaaattgacataactgaaaaacagaaagtaaargtaactagacaaagtagatttctcagagtctatccattaaaacttaagttctttaatcacagaaaagccctcagcttatgccctgagtgcttcagtatgc

SEQ ID NO: 18525 - DNA, 201 bp, Homo sapiens
tattttgtatatttacatcttcagagtaagtaattttattagcatgagttgtaaaatgcaaattgtaacattaagggaactcttttgaagttagatagcartataattttgaaattagaatatattgcattctaagtgaaagcaaattacatgtatcttaaaactttacgtaaacttatggaatttttaaacattgtggag

SEQ ID NO: 18526 - DNA, 201 bp, Homo sapiens
aaaatgcagaaaataaaatctctgcagcctctttaagggtttttttttaaccttttaccgttgtatttgttttcatagccattatgttttcgacttgatgwtcccatttttccttcctttttctagtaatcagagaaggtgattctcgatggactgaaatcaagcatagtccctgctggaaacagaaagggaatcttaact

SEQ ID NO: 18527 - DNA, 201 bp, Homo sapiens
ctcagagtctatccattaaaacttaagttctttaatcacagaaaagccctcagcttatgccctgagtgcttcagtatgccgggaagatttctctgtgcaayattgctcagcagttactgatcgtgtcaatgacatcaatcattgcatcagtcaggatccttttcactggaagtgacagaaacccagtgaaatccgacttga

SEQ ID NO: 18528 - DNA, 201 bp, Homo sapiens
taggtacttctttacagaaaaatcgtagtaccatgattgaagtttgaagaagtttgaagactctacaattctagcaatcaattatgagccacttatttttrggatgttattttttaagattataaagatacactttctcattagagaaatttagaaaactgcagaaaagaaaagaaatctctcatcccaccatgctgataa

SEQ ID NO: 18529 - DNA, 201 bp, Homo sapiens
acttgcttttggcatgacctttatctgtggtctcaaacatagtcccctccattcgagctaggtctgtggttttggttctcgcctgcagctgtatgtgtgcrtgtctgaggtgtgtggatgtgtgtgtgtgtgtgtgtgtaacagagggaagaggaagatattctctcagctggcatagggcagaggggaaatctttattcg

SEQ ID NO: 18530 - DNA, 201 bp, Homo sapiens
gattcaaaatattctttccaaaaaagcagtgagataataatgaagcttggaaacatttataactaaaatgatttaaatcaagttttaatgcttaaaaatascgatcttcaggtttcttgaaaactgccatgtaagactgatttccccaggagtctacatgcccgaggtcttattatcacacttctaaatcattaatcacct

SEQ ID NO: 18531 - DNA, 201 bp, Homo sapiens
gactagttcctgccactgaagaattttactcctccttgagatttgccacattatttaatgagttcctggatgggagttgatactaaattaaaaacaccagmtaggagaacagtagttacggattagttagtctccatcataaacacagggatgtgagagcattttagcattttcatattgtaccatctgagtctgatgcaa

SEQ ID NO: 18532 - DNA, 201 bp, Homo sapiens
agttgaggctgcaacgagctgtgatcacgccattgcactccaacctggtcaaggagagtgagactctgtctcaatcaatcaatcaatcaatcagtcaatcratgtatgtatacagatcagtggtttgtagtctattccaactatctaatccactatccatctaatagatatatcaccaccactaattccagacacattaga

SEQ ID NO: 18533 - DNA, 201 bp, Homo sapiens
ttcaccctataaaacaggaactagacctcatgttttaaatgcttagaagactttttttaaaaaaacctttaggaagttacattctagcttttgaacttctkttggtattatttcacaacacattttgcatttccttctttatgttacattgaaaacatgcagtccgctcaaaggctttctttagaaaaagaaagctttact

SEQ ID NO: 18534 - DNA, 201 bp, Homo sapiens
agaaactttggtatgaactcttattaccagctaaccttggcagaaacctagtcgtaccaaacaagtcctattaacacaaatgccactataaatcaaatgcrttatttcctcccatggttgactagttcctgccactgaagaattttactcctccttgagatttgccacattatttaatgagttcctggatgggagttgata

SEQ ID NO: 18535 - DNA, 201 bp, Homo sapiens
aaagaaagctttactgaagatatcactgtgagcttgctttgcccagcagaagactttaataagttgctcaatttaaagacagttttcttacctttaatatrttcttagacattagaattttctgctatcacgaagccttatttgaggagaagatagatgcagataaattgctgtctagattataacaatgtccttaattat

SEQ ID NO: 18536 - DNA, 201 bp, Homo sapiens
tttacaataagaacctgtactccagcagctcagtcctgtcatacatggtagaaccgtgtttgaaatttcttctttctccctcttttcttcctttttatttkaatgtagtttgtacagtaaaaaggtgagagggaaaagaaacaaaaaccagacactgttctcatagaagtgaacctacactaacagcaaggtttttctctt

SEQ ID NO: 18537 - DNA, 201 bp, Homo sapiens
agacaccactttaggtagtgggaacagagtcaggtaccaggaagcattcagttgtgggtaacagaaatctggctgaaatgattatgaacttgattatcgakcattggaaggtcagaggcaggcagttcagtgattggctgattgagaaactcactgattatatcgcaatatcagagccaggattcacatccaaatctgact

SEQ ID NO: 18538 - DNA, 201 bp, Homo sapiens
gactctgcctcaaaaaaaaaaaaatttaaaaagatatgaggacccagcccagctctggggatggaatctgaaagagtcagcctcatggaggaggagggagkcatgaacaaattgggggttctgttaggctagagagaggagggaatgagggctgggtgggcagccaacaatagtgactggagacagatgatcccctccttc

SEQ ID NO: 18539 - DNA, 201 bp, Homo sapiens
agctgggacaacaggtgtgcaccaccatgcctggctgatttttgggtttttattttttattttttgtaaagacagggtttccccgtgttgcccagactggyctcaaactcctgggctcaagggatctacccacctccttcctgggctcaagggatccgcccacctcagcctcccaaagtgctgttactataggtgtgagcc

SEQ ID NO: 18540 - DNA, 201 bp, Homo sapiens
tttgacattttctttttccttcaacttttcatttaaaaaaattcaaacctatggaaaagttgaaagaatagtacagtgaatacccatttacccttcacctrtgttcactgataattaatgttttacaaatgtgcgttgtatttctaaatatatgcacactgtgccttttgttttgtttttgttttcattttgtttgcttta

SEQ ID NO: 18541 - DNA, 201 bp, Homo sapiens
gggttaccatgggcactgttctttgtgcttgcgagtgatggtcagatccccttctcagatctgtggctgaagaactggtttatgttcattgttcctagttraattcctagtaactagcaggcatttgcaccacgaaggtagaactttattgccttacagaataagctgaaatttctagagtgcattctgttagaattattc

SEQ ID NO: 18542 - DNA, 201 bp, Homo sapiens
tgttttatttgatggatccaaatctgttaatatccttactgatttggatgctcagactgccccagatttggccagtggaagccctttcaggcttgctcccrtgtcccttcaatgtatccccatcattctttgagcacttctttgcttcctggcacaaaaaatgttccaagttcatctagcacgttccctgtcttagtgcta

SEQ ID NO: 18543 - DNA, 201 bp, Homo sapiens
ccatgtggctcggtgttattcactctgatccatatggtcaggctggagatgttccctggaggggtgttaacactcagcaacccaaccgcctccctcccttsagagctttcctgcatggctcctgctgcttgcccatgtgtgattcttgattaatttttcatttttaatgaagtttgatcatgtttattatttctcatgatt

SEQ ID NO: 18544 - DNA, 201 bp, Homo sapiens
accaagttttgtttccccttctatgtggacaggtagtgtcagattttcaaactttactagaaaaaaagtatcaataaacctgctatagaaaataaaaaccrtaccattcttaacattctgtctgtttaaccatgatttaagatacctgtgttccaaggagagttgcaatattctcccttcctggggtttttattgacactg

SEQ ID NO: 18545 - DNA, 201 bp, Homo sapiens
tacatttgaatcaactctgagtgtagcttgtgccctaatctcattccttctagaagttggtgaggagtttaagtacttcctactttgtgttctggtcctcrtagtgccatcctaattttcctggggatcatacatttcgtaattcaaagtaagcaaactggacacggtgccttggttatgcatggaaatattttctgtagt

SEQ ID NO: 18546 - DNA, 201 bp, Homo sapiens
tctttatgtttgaggcatacgtggtgtcttttgtcaaaccctacatgaatatcaaacctatttctgtactggggccagcatctccccagccccctcagtcrtgtgtgcccagacctccctgcaggtatcttactaagggctcagccttgcttttgttacttaggccttttatttctttcaggaaaatcagtggaatgagct

SEQ ID NO: 18547 - DNA, 201 bp, Homo sapiens
gctcctttaaaataagaccagttaatactactctcttatttgtggacttctgtggccaaatctttggtactgccttttttcgggggtgaggggtggtggaygggaaggaaggtagaggaacagagagaggctgactgtgccaaagataaactatgttacagatggaaatgtttttttctaagtccaaaatctataagaaac

SEQ ID NO: 18548 - DNA, 201 bp, Homo sapiens
aggagtgtctgtccatctcagcgtggtaagtggggcggagtattagccatcactgaaaacgcatttcattattgacagtaagagggagctagctgaacagkattgtattttgtcagccatacctcccctaaccctacccccaaatactctgagacctctgagttcaagataggccagagagtagaatttcttcctttctct

SEQ ID NO: 18549 - DNA, 201 bp, Homo sapiens
aatggaatgtatataatatactttatgggtgtcagatgaagaactcttgttggagctagtgtttaattaaacccaatggcctttaagaattaaaaaaaaawttttttttattaggaattagtacgttagagcttggaagtagcttatgttcattccttagcggttgggacaagaattttgcttttgctgaaagagcctgtg

SEQ ID NO: 18550 - DNA, 201 bp, Homo sapiens
cttttatggcccagtgcattatgagaaactctattgtgtggtgccgagcactgtaaagcggaggacataggctttctttcatgtactgctgttttgttccrcatgcttaggcattattagcagatacaactgagtaagctaaagcagcagagatgaagtataggtgtttattaggcaatgcactggggaaatgggaagctg

SEQ ID NO: 18551 - DNA, 201 bp, Homo sapiens
gttttagtttttcagttgtccatggtatatttgtctaggttgtctaaaatttgttctaagggcttattgacctacctcagtttccctaaagtatttagagrccagagacaacgtaacgttgcagattaaaatgagcataaagttaagtggccaccctcacttagctcaggcgtgcaccttctctttcctagctgattacca

SEQ ID NO: 18552 - DNA, 201 bp, Homo sapiens
attccattttaaagataaggcaactgaggctgtgcagttgcagagccgctctttaggggctaatatcaaggttgatgctcttcctgctacccatgctgttyccaatgctgcccacgttttgaaattcttctgaagtttctaggcttgggaacaaaatgtcatattaggatttttgttgtgaaaggaaatgtaactatgcat

SEQ ID NO: 18553 - DNA, 201 bp, Homo sapiens
cagttgtccatggtatatttgtctaggttgtctaaaatttgttctaagggcttattgacctacctcagtttccctaaagtatttagagaccagagacaacrtaacgttgcagattaaaatgagcataaagttaagtggccaccctcacttagctcaggcgtgcaccttctctttcctagctgattaccatggcctcctaac

SEQ ID NO: 18554 - DNA, 201 bp, Homo sapiens
cgtaacgttgcagattaaaatgagcataaagttaagtggccaccctcacttagctcaggcgtgcaccttctctttcctagctgattaccatggcctcctarctggcctttatgctttccttcacatccatatttaatgctgtcatctcagcaatcttttaaaaacacagctgagaccacaatattccctttgtaacacctt

SEQ ID NO: 18555 - DNA, 201 bp, Homo sapiens
aatattccctttgtaacacctttctgtggtcctctgtcaccccaagctaaagtcaagctcattagcagggcaaatgaggtcttccatgctccatcctttcyctatccagcttcatcttagtccactcctctcctctccttttaaatatgcatttcccaatatgtctcaaccaaatttcatacattttttaaaatttccata

SEQ ID NO: 18556 - DNA, 201 bp, Homo sapiens
tggatgataaattctccaagtaagatctcagtcacacttggtttctcctattgcctacagactgatcatttctcagcttgtgtctttggccctgacttccragtgccagacctgggtcctcagctctctgtccgtagctgtttctccatcctacatgggcatctcaaattgaatttaacctcctcccctcgaccaaccttt

SEQ ID NO: 18557 - DNA, 201 bp, Homo sapiens
aaagttacagaaaagttgtaattgcactgcaaataattttttcttctgcacaatttgggaataagttactgatctcaacctcgactacgtcagtcgactaygtcgactactgcaaacaaggtgattctcctgcacaaccacaatgtggtatcaaagtgaggaaattaacattgataccgtactaccatctaattctcagtt

SEQ ID NO: 18558 - DNA, 201 bp, Homo sapiens
ttcactctcctctgtgggcacccttgtcacaattgggttctgacaccctatgttagattactctagacagtgtgggcgctcttctcgcactggttgcactytgagtccccatattgtgcaagccctcctatgtggatgccatccttacctactctggactactgtggctacttctcaccaagtatggacgtgtacctcgac

SEQ ID NO: 18559 - DNA, 201 bp, Homo sapiens
agagtcgttgacaggactggcgagcccctgaatcctgagcgcgctctctccggagatcatctctgtgagaccccgcggcaggtgctgcggcttttcttccmggacccccttcgatcctgagcaccccctcatccccctcgcaggtggcgcctctggagggcaagttgtggggcacccagaaacctcactgtggagtctgcc

SEQ ID NO: 18560 - DNA, 201 bp, Homo sapiens
tgtgcctttaactgatacactgaaaataatggtggctatgacttagtagtgcttattttataccagtcattgttttatatgctttacctatattaactctyttaatcatcacaaaaaccctatgggatagatactgttactgtctcaattttacagatggggaaaccatggcatggcgagcttatgtaatctgtccaaggc

SEQ ID NO: 18561 - DNA, 201 bp, Homo sapiens
tatacacagatgaacaagtatgtgtgtattttttcttattcttcctggagcccataagagattaattattgtcctcattttataagtgttacaaaccaacrcacagaaagatgaagtaacttgccttaaggtaatacagctagtaagtagtggattgttgattcgattctaggtctgtactgtgctgcctgtgtctataat

SEQ ID NO: 18562 - DNA, 201 bp, Homo sapiens
  misc_feature (1)...(201): n = A,T,C or G, or insertion/deletion polymorphism (see Tables 1-2)
acaaggttttgcatcagtatgggttggttaaaagcgtaaattctggttctggtacagccagtttataagctgtgtgacgataggatgtacaagttgtttcntatttttaatttataaaatgggattattaatgggtcccatcatagaggtttcataggaggaatgaaagaaatagtacagtctttttgccacaacatgtgc

SEQ ID NO: 18563 - DNA, 201 bp, Homo sapiens
acaacttttatttgtaagataacattaaaaattatttataaaaatgtatacctgtatacatttttctgtatagaaatttgttatatgcagtaacattttaktatttcctcaaatttgaaatgaatatcatgtgatattaagtcacttaaaaattctctaatatgagatatgaaaaacttagactcaaactataatatattt

SEQ ID NO: 18564 - DNA, 201 bp, Homo sapiens
  misc_feature (1)...(201): n = A,T,C or G, or insertion/deletion polymorphism (see Tables 1-2)
tttgtccatttcatatatctaattcattggcacacatttgttcatagcattctctctctctcttttttttttctgctaaaccagaaaacctagacaaattntgaaagagctgtaacattaatattttcttgctcctctgtatttctgcaaatatggtcctcatggttttttcttttacttctcacctctcatacattgtac

SEQ ID NO: 18565 - DNA, 201 bp, Homo sapiens
tctcacctctcatacattgtacttgcagccactgcaaagtaattgtcattttcagatgctgtttctttgtctgaaatgtcttttctcttgcctcattggargaattggcatttatcttcaagataattttcttcatgctgccttccctgattgtccagacagactcagtctttccttcctttgaattctggtgtacttcta

SEQ ID NO: 18566 - DNA, 201 bp, Homo sapiens
agtcactcccctcccagtgtcctcacttagaaagtagtggccttgccaagcgcagtggctcacacctgtaatcccagcactttgggaggccaaagcgggcrgatcacttgaagccaggagttcgagaccagcctggccaacatggtgaaaccccatcattacttaaaaactacaaaaattagctgggcatggtggctcaca

SEQ ID NO: 18567 - DNA, 201 bp, Homo sapiens
tatcaacagcaaaggattgttttcctgtacacagttcacatttatgaatggcttcctaggcactgagcactgtgcttggtgacttcatgtatccttccagyttgtcttcattgcataaggtctggcagaggatttttgcttttcagattgtcacctcaaaatttccattgtctccacacaaaagcttgcacatgaatcttc

SEQ ID NO: 18568 - DNA, 201 bp, Homo sapiens
ttaggctcagtatcaacagaatgtaatctaatttctccagattggagtaaattcgggccttctgaccggatgagaattagaattggatgaagtgaatccaragtagactgaaatgaatcttgagttcatttctgaatttcatttgcaagtgtatccagcgttaggtgtgttaatttcatattttggttcatactctgaggc

SEQ ID NO: 18569 - DNA, 201 bp, Homo sapiens
attcctcctcatagtattgttgtgaggatgaagtgagtttcttatatacttagcaagtgtccagaacacagtaaagctcagtaaatgatgactgcttttaygattctgttgtgacccttatgtgttgaataaattaacttcttttggtgcttgctgaattgtggaggaggtagattccttttatctattttcttttggcaa

SEQ ID NO: 18570 - DNA, 201 bp, Homo sapiens
aggtctcactttgtcacccaggctggtttcaaactccagggctcaagtaatccacacacctcagcctcccaaagtgctgagatgacaggtgtgagccaccrcgcccagcctgggtatttcttaagattcagaagggctttcccagatgctctcctggtgacttctcctccagtgccattgaccagaattgagtcacatgcc

SEQ ID NO: 18571 - DNA, 201 bp, Homo sapiens
tctaactcatgatctgctcattaaactgaatgaagctctggtccccttccactgagcagcacatttaaaaaatcaggtatgcaaactaaaaacctactgcyttcatcctggtcacctgccttcctgctcaccctctatattcaatatatcagaaaaatttgattgatttacctaaatatctttaaaaactaggtatttctt

SEQ ID NO: 18572 - DNA, 201 bp, Homo sapiens
ctgaactcaggtgatccacccacctcagcctctgaaaatgctgggattacaggcataagccaccacaggtggccttttttttttttttttttttttttttkgagacaggatcttgctctgtttcccaggctagagtacggtggtagtcaaaactgcagcctcatgagctcaggcagtcctcctgcctctgcctcccatgta

SEQ ID NO: 18573 - DNA, 201 bp, Homo sapiens
tggtatgaattttgggtatttcttaacattacttattatttcttgtaagccaattctctttctatcttttttctgggactcccaatgacatacaagttagrcctagtcacagtagttcatatataacttactctcccttctctttttcagtgttatccatttgggcttaatctggatatttttttctgacctatctgttca

SEQ ID NO: 18574 - DNA, 201 bp, Homo sapiens
gaacaccactgtcccgccttcagagaactttcaatctattgttggcaagtgattgcgagttaaaggtcttgttaccccactctggatttgagtggtactgkggtttagagtgtaagagcttaagttttggggtgtttctagatctgagattaagtcctggttctgctcctttgtcagattctccctactttacctctctga

SEQ ID NO: 18575 - DNA, 201 bp, Homo sapiens
gaacttctggttttaacctgaatgtaattggggagaactgatattagaagaaatggaagggagccggcatgggtggtgtccctcctgtgtgccaggcagcrtactagacacttcccatgcgttgtcatttcttacacagattcactgggcagtgggtcgggataggtcgggggatggtagcatccctgttacagatgaggg

SEQ ID NO: 18576 - DNA, 201 bp, Homo sapiens
acgtctttctttctttctcatattgagcaaagttatttcagtctgtgaaataactgtgtctgaggccagtattatttgaatcccttctgggtctgtttctrttgctttgaatctctgttgtcacctttcttttgtccctgtttacttcgtaattttttattgagtgccaattgttgtatattcaaaaccaggtatatttta

SEQ ID NO: 18577 - DNA, 201 bp, Homo sapiens
ctcttattaaattttattgctttagtgactttataggctttagtattatcagtttgatagaaagccagtgctatacagatatataaaaactcagattatayatggggacatagaaagccagacccagacaaaaggaagccaaagcgtctaaggattaagacaataatagttatgattgtggtagcttggtaagtgatttca

SEQ ID NO: 18578 - DNA, 201 bp, Homo sapiens
tttaaggcccaacagtaagcaaaactaaacattatttgagctacatacatgtgtggtaaaactttgaaattctcagaaacagaattgagaaaaagtcttaktagggtcagcaggaagaggcaagaggaggcagtggaaaaactcttaagacaatgtgaggaagacgaaaatgtctgtttctttaggagggtaggttcgcag

SEQ ID NO: 18579 - DNA, 201 bp, Homo sapiens
aaataactgtgtctgaggccagtattatttgaatcccttctgggtctgtttctattgctttgaatctctgttgtcacctttcttttgtccctgtttacttsgtaattttttattgagtgccaattgttgtatattcaaaaccaggtatattttaaggtctagggtaatattatcctcctccagagaggatttatattaatt

SEQ ID NO: 18580 - DNA, 201 bp, Homo sapiens
atcacataaatgcatcataattcgtttaatcagtcccttataagacacttagtagtctaaatagttttgttattacaggttgaacatccctaatctaaaartttgaaatccaaaatgctccaaaatgctgcagaatctgaagccttgtggtgctgacatgatgccacaaatggacgattccacacatgagtacttaacaca

SEQ ID NO: 18581 - DNA, 201 bp, Homo sapiens
cagaggtggtgttcgtgaggccagaggccagggtcacttgaccacagctggtccctgcgggtctgtgcagtgggtgcttgagtcagggaggaggtgaaccrttgctagacagcccacccaagcagagagagcgtgaagagatactcaaacttttcccttccactttcctcctcctaatctctcgctggtgccttgcatggg

SEQ ID NO: 18582 - DNA, 201 bp, Homo sapiens
gcccaccgcaggtccttggtatatgttaggttaaagagcaaaacccatgggtattggtgtttgaagacgcgtcctcttctgtgccagtgtctgtggaaagrccagtgtagatggagcactatgggagctgtttattcagctagcttgtgtggccctctctgggccaacctgctagctgggcttccctaagataaagggaac

SEQ ID NO: 18583 - DNA, 201 bp, Homo sapiens
gtgacccttgtggttcccaaccctggccgcggatcagaatcacggagggatgaggagcggggggggggcggcttttaaaaaggcaaatgtccaggcccccytcagagatttctgtcaagttcctgtgatctgaaatcagagccaaggcccaccatcttttcctagtgctggtctttaaaaaaaaattattttactattgta

SEQ ID NO: 18584 - DNA, 201 bp, Homo sapiens
atcattgacagtggctgagcagagcctatcaggtgacccttgtggttcccaaccctggccgcggatcagaatcacggagggatgaggagcggggggggggsggcttttaaaaaggcaaatgtccaggcccccctcagagatttctgtcaagttcctgtgatctgaaatcagagccaaggcccaccatcttttcctagtgct

SEQ ID NO: 18585 - DNA, 201 bp, Homo sapiens
ttctatagtatatttctaaaagttgagttacctggtcaaagggttagtacacatttttaagatgtttataatgtaatacctaatcatattccagagagctrtatcctttatattccaactaggaaaacatgagaaatttaagttaacgttctgaggtctctgagggaagttttcaaaaggggactcccaaaataatttaac

SEQ ID NO: 18586 - DNA, 201 bp, Homo sapiens
atggtatctttgaatttcatactctaaatatttgtggatgtgttgaaatacagttaaattttgaaacctgacgtagtatccagcacatttgctaagctgtyttattgattccaataatttatctgtagatattgtatttttttaaacacaatcatgttgcctgcaaataatagttttatttcctcttctaatccttatgcc

SEQ ID NO: 18587 - DNA, 201 bp, Homo sapiens
gcagccttccgcttccctgtgcttccccttccatcctggagcactccattctctctgctggagatgcctttgtttgtaaagccaggctcttctcatgccasatggagactagaagggtgggattgtccaaagccatcacttggtgggggctgaaaaaggcatgagaggcttcctcctctgcaggaaaccagccaaggagag

SEQ ID NO: 18588 - DNA, 201 bp, Homo sapiens
acatcaaagatcattgatcactgatcatcataacagatataataataatttaaagagtttgaaatattgcaaaaaattcccaaaatgtgacacagagacakgaaatgacttgctctatccagggttgtcatatactttcaatttgtttttttttttttttttttttttttttttaaagcagtatctttgaagtgcaataaa

SEQ ID NO: 18589 - DNA, 201 bp, Homo sapiens
ccaccttcttggcctcccctcaccagccaccccaatctttgcatgcacagtcctcagcctttagtgaacctggttggtccctgtggcctccagcatctgtrctattctattttctcacctataccgctcctcggttggggtctggcctgtctcctgccaactttgacatttcaccttctgtgtggccctgctgtcccagca

SEQ ID NO: 18590 - DNA, 201 bp, Homo sapiens
ggatcaattgagccataacacatttcatcaggaaggtgaaacttgaactgggtctgatgagtaaggtttgggaaaagaaagaagggagcatcccttcctasagtgagggtggaggtaactgaggaagcaaaggcttggagacagggcccctcatagccagtgagtgcgccattttctttggagcaattgggtggggagatg

SEQ ID NO: 18591 - DNA, 201 bp, Homo sapiens
caagtcctctcgccgagtctgtgtagaggcagccagtcatcaggggaaggagtgagctcaccaggctgctaggaaggaccggagctggagaaccagaggtrgtcaggtgagctgggggggttcagggcaggagaagggttgctctgtcatcctcatcccagaaggacacccagacggtccttcccatcagacggcagttga

SEQ ID NO: 18592 - DNA, 201 bp, Homo sapiens
attagaagaaccgtgtcagaaaggattccaggtgactttggaaattttagttgacaaggatagcacaatgggctaagaatacctgcttgttttagttttcrctactagctgtgtgacctcatactagtcccttaacctctctgggcctcctgtttcctgtctctgtaacagggaaataatccttctctaacttgcctcacc

SEQ ID NO: 18593 - DNA, 201 bp, Homo sapiens
gccaaagtcactcagcaaaccagctaggcctggagaccctgcggtgggagcaggagggccctgcacacaatcagatgttctagtgtccgaaatctgagacygcttcccacgggattactgtctaatccgctggtgacaatccagctgctcacctgtccccagcctcagctctggtccccagggcctgcacactcctggcag

SEQ ID NO: 18594 - DNA, 201 bp, Homo sapiens
gacaagaggtcttcagaagtcctggcctaagtggtcacaggggcatcaggagcccaggaccacttggctagtttcagaccagctggggcaggcaggaaggracacactcgtatttgctcagttacaatcaacgactccttctttgtgtaaaatggtaatgaggccattaggagaggctcacctgaagtgcagcgttgtgaa

SEQ ID NO: 18595 - DNA, 201 bp, Homo sapiens
atctggagaattgacatttggtgtgtttttacatgtgccaggaagtttaagccaaaagtaatttgctgagcacctattaggtatcaagtactctactagamcctatggtaaacagagaagtgagtgagctgataacgacagccggtgtgctgtggatgtgaggcggggttttaccagagatgagattgcggaggtggatgg

SEQ ID NO: 18596 - DNA, 201 bp, Homo sapiens
atcaaagtgattggatttggatttttccaagattactaggacagatatgggtgaatggcattgaggagaaactgaaggcagaagaaggcccactgaggaamccgctccactagtctgggccagagagggtgatggagctgaatttgcagggccaatgtcatgggcactgagaggagaggatggattcagggcatatctggg

SEQ ID NO: 18597 - DNA, 201 bp, Homo sapiens
tgtaggcgatggactgggagggggagaggctggaggcagggaaacctgctgatggtaatggttgctaatgtctgttggtggcactgtgcaaagaacctgaygtccatcatctcgttgaatcttcctaacaggacactcgggtaggcagtgctgttacctgtacttcacagatgaggacagtaaggcttggaatggtcaaat

SEQ ID NO: 18598 - DNA, 201 bp, Homo sapiens
cacaccagccacatttcaagtgctcagtagtagctagcatattggatggcattggatagaagacagattatttccatcactgcagaaagttctgttggacratgcagaattctaggcaggggggcaatggtgggtgagagcactccacaccggaaataacctatgcaaaggtcctggggtaagggggaggccagtgggact

SEQ ID NO: 18599 - DNA, 201 bp, Homo sapiens
atggttcccccgaagtagaaaggccaagcataagagaagcagtattgtggggagtggtgtaggagagctgggtgtctagacagggtagcagcctgtgcacyggtggagggggtgggctcccctctccctgatcacctcttcctcttgatgaatggtgtgaattgaggggtgggggggctgttcccctttaccccacacact

SEQ ID NO: 18600 - DNA, 201 bp, Homo sapiens
aaggagctttgtagcctggcacctgtggctggagttcagatgttacccgaagatttgggttttctttttaaaaagaagaaaaaagaaagagcagaagaaamccatgccagtgtctcctggacgaaggggcatgggttggggcctgccagggaaaggcaggctgccgtcggcctgcgtgtgaagcactttataagctctgta

SEQ ID NO: 18601 - DNA, 201 bp, Homo sapiens
gaaaataataacaagatatatgaaaaaaaaaatttaggaaaaattcggcaatattcatgataagaactcctagaaaatgaagtattctcactgtgatagasagcatctagaaaagacctacagctcacatcatacttaatggtgaaagactgatttctttcccccgagaatgaaagaaaggtatctgctcttcttatttct

SEQ ID NO: 18602 - DNA, 201 bp, Homo sapiens
atttaaaacaccttttgggaaaaggcaccctgctcccagccaggagtccaccaggtcatgtccaaggcccagctccatcatatcgtctctgaactaactgrcgccttaattatttaaataacggcgagggctcgcttccttagcccatgaccttagaagtcagtacaggcctttgtgtgtgtgtttgaaaagaaactagcc

SEQ ID NO: 18603 - DNA, 201 bp, Homo sapiens
cacaggcttggagtcccagcacacgtgggtcctctgctggtaacctgggggagccctcagctgttccaagtccgaggagctgatcagccacacaactaggmccagcacacattcagcacacagaagtggtgtgggaatgggcacacatatgtcccaactcagcccgtggtcactgccgccctccttccctcccaacagagg

SEQ ID NO: 18604 - DNA, 201 bp, Homo sapiens
caattttgacaaattaggtaaaatgaacaaattccttgaattacagaaagtgactcaagaagaaatagaaaaatggcactatttctattaaagaattttawatctgtaaaactttcccacaaagaaaaccctaggcccagagagcctccctggtgaattctatcatatatttaagaagaactaacacaatcttatcaccaa

SEQ ID NO: 18605 - DNA, 201 bp, Homo sapiens
tcacttctgtggtattctttccaaaaatccactctaatcatgcagagacttctgagaaattcaaatttgggaacattctgcaacaggggtctccaaccccygggctgtggattggtgccagttcatggcctgttcggaacccagccatacagtaggaggtgagcagcgagtgagcatgaccacctgagcactctacctcct

SEQ ID NO: 18606 - DNA, 201 bp, Homo sapiens
gaggcggaggttgcagtgagccgagatctcgccactgcactccagcctgggtgacagaactagactccatctcaaaaaaaaaaaaaaaaaaaaaaaaaaamaaaaacaggcacccgaacccacaggagccaggaagaggacaggggacagccagctttcatctgcatgttaggttccacataaaatatcctaggagttaca

SEQ ID NO: 18607 - DNA, 201 bp, Homo sapiens
acctgggaggcagaggttgcagtgagccgagactgcgccattgcactccagcctgggagacaagagtgaaactccgtctgaaaaataaaaatataaaaaasgctagatgcacttcccactggggctccactagaggtaagggttgacccaggcgctgcctctccatctacccagtggtgccctgggactcaggtccatggg

SEQ ID NO: 18608 - DNA, 201 bp, Homo sapiens
tgtgtgtaataaaatccaggcaagtggtgggtggcagaccgcaggggagtagctgaattgggttaatgagggaaaaggtgctttttttttttttttttttytcatattctgccttaagctaataaaaagtttaagcctggacgttttcgatggttcatcctttatctctgacaaatatctgactgtatgtttcatgggaga

SEQ ID NO: 18609 - DNA, 201 bp, Homo sapiens
ttcacagacagctctttgtgtgtaataaaatccaggcaagtggtgggtggcagaccgcaggggagtagctgaattgggttaatgagggaaaaggtgctttttttttttttttttttttcatattctgccttaagctaataaaaagtttaagcctggacgttttcgatggttcatcctttatctctgacaaatatctgactg

SEQ ID NO: 18610 - DNA, 201 bp, Homo sapiens
ctagtaagttatgctatgattaaaactaaatggaccaagtctgcttttgagagaggcagtctctgttttctcttagcctcatagaatcagtcccggttgckccttggacacacctacaagtcctgttcattatttttcctaaactgctctctagtctgtcctattcttctgtttccctctgcattcacactcaaagcttct

SEQ ID NO: 18611 - DNA, 201 bp, Homo sapiens
attgctttgtatgtcatcatgttgctcaatttcacaaattagaatgcatagccaccatcctatattgcatgctgttgtacttagttcatttctaactttcyataattggaggctgccatgtgtatccggtgaacactcaataaaattaattgagggtaatgatgatgaagacaagatctatagtgtcatcgttatttctcc

SEQ ID NO: 18612 - DNA, 201 bp, Homo sapiens
ccgcctaaccacatcgctttcttttctagtgagattttgtctttgtaggctgaattgtttttagttttatattttaatgaagaagattgtcagcattaggrattcctttaatttcatttgctttcagcaaacattggaattattgttaaactctcaaaactatcattcaatgaataatatctaattatcagttgtaaaaac

SEQ ID NO: 18613 - DNA, 201 bp, Homo sapiens
tactttgtgtaccctaatcctgaataatgtgcttggctttatgtacctatatatgtatttttttagaaagacatttaaactggtagtttgctttagatttyaatacattaaaattaggtgagtatgttcaaatatggtgatatttcaataagaatagtatatacttaaaactgttacagtttggttccaaaataaatatat

SEQ ID NO: 18614 - DNA, 201 bp, Homo sapiens
gatcacagatgctgggctgaaataggacagctggctccgcctgcttcttcagtccctgtcccagcctgcctgtatcaccctcgtcccccagcactgctgtrcatgtccctttgctgaagcccatcctgtaccctcagctttcaacattgcctctcccctgtttgccagggtaacacatattcatccttcagaactcaactc

SEQ ID NO: 18615 - DNA, 201 bp, Homo sapiens
aataggcattccatgaagtctgttgaaggagagttggctggagtgcccctgaattaatctatcccaggaaatttaataagggcaattcagatagaattcarttcagcaaacatgtatggaaggcagcctactctgtgctgtgcactgtgcttgaagtctgtggtgcctttatctgtggcaagagcacagatggtaaggaga

SEQ ID NO: 18616 - DNA, 201 bp, Homo sapiens
tgcagtgagccgagatctcgccactgcactccagcctgggtgacagaactagactccatctcaaaaaaaaaaaaaaaaaaaaaaaaaaaaaaaaacaggcmcccgaacccacaggagccaggaagaggacaggggacagccagctttcatctgcatgttaggttccacataaaatatcctaggagttacagctgacacagg

SEQ ID NO: 18617 - DNA, 201 bp, Homo sapiens
tgaacaaaataagcgaagatccttgcctttataaagtgtataatttaggaggggaaaacagataataagtacaggttaagcattcctaatctgaaaatccraaatgctccaaaatccaaaacttcctgagtgctgatgtgatgtcacaagttactctgaacatgttattttttcactctattaacagtatgtcagggctgg

SEQ ID NO: 18618 - DNA, 201 bp, Homo sapiens
attgagtatttcaagtaaaaataataccagtggaggtattctgctggtaataataccagtagggggtggagaatagaagtattctgtttaaaggttgttaygttacctgtatacaaaaactggcataatattatttgaaggtagactgtattaagttagagatttatgttgtaaaccttacaagggccactaagggaggaa

SEQ ID NO: 18619 - DNA, 201 bp, Homo sapiens
tataggccatggagtcagatctgactttgccagttgctgacctctcccagactttatattggaaagaataacgcctcactggatttttgtgaagactgcamaattacacatccacagtgtctggtacagtggctggcacttgataggtagttagtatatagagctgttaattcacttgctctgtatttataaaggttgatg

SEQ ID NO: 18620 - DNA, 201 bp, Homo sapiens
gaagcaggaaaacctgttaggaagctattggtagttaatccaggtggaaaatgatggtggcttaaatcagggtgttagtggtggagatagagtgaaatggkcagaatttgaatatattttgaagatttagttggcaggagtggctgatacattggctctgggatgtgagagaaagatcaggagttccattttggatatgtt

SEQ ID NO: 18621 - DNA, 201 bp, Homo sapiens
ctgtctaccacgttttctaggaactttaagcctaaggcagaactcagggtttttggagcctgtgtaaaataatttatagcacctttccagtaagtcttgcmcacactcttattctattaattaaacattctgtagcaatctggtatatcttaaagatttaaaagtatgtatagtagaagactggaaaacatagactgttga

SEQ ID NO: 18622 - DNA, 201 bp, Homo sapiens
cattattaccagcagactcaagactggctcatctgactccagcctcatccctccaatctttccgcctcatgccccagagtgacctttctaaaaacataaastccatttcccacctaactaaaactattccatcagtgaatgtaatttttcaaaaaaacatttaaggacaaaaaaattctcctataacttcccattacctag

SEQ ID NO: 18623 - DNA, 201 bp, Homo sapiens
gcacagcacatcgggaaggttctaggatctggggcccaaagatttgagcagcagtcctgtcttcattgcttattagactgttccatcttggagaatctctytgagtcttggtttcctcatttgtaagatatgtagaattcctgttctgctcacctttaggaactgacctaagtgctggatgcgacctcatgttgtaatcac

SEQ ID NO: 18624 - DNA, 201 bp, Homo sapiens
caacctaaatcccagaacaccaacatggccctgagtcctggttggattggcagagaccatctgtcctcactgccactgccctgggcactctgaggaagccsctgacccagctaggagctttgtgctcttgtcaatagacggtgacagcccccaaagctctccctgcagtggaaatacctcttgtgtggggggtgtggaagg

SEQ ID NO: 18625 - DNA, 201 bp, Homo sapiens
aaggcagaactcagggtttttggagcctgtgtaaaataatttatagcacctttccagtaagtcttgcacacactcttattctattaattaaacattctgtrgcaatctggtatatcttaaagatttaaaagtatgtatagtagaagactggaaaacatagactgttgagatggaagaagattagcctttcttaaaagaaaa

SEQ ID NO: 18626 - DNA, 201 bp, Homo sapiens
gtatctaagattgtgacaatctgggctttatctctgagaaatgactgaaaaaaaaaatgtgtccttgtgatttttcccactccgtcattgatcactctccrttcatgtcctactcccactgccttctcctcgtctccctttgcctcagagaaaactaatggagccatagagaaagctctgagatataaatgaccttgtgca

SEQ ID NO: 18627 - DNA, 201 bp, Homo sapiens
gttctgtgcctgagtgagattgtgcttttgggagtcctatactgtgaaatgtgtgtgttcaaatatggaaatgcttcttgtggccttcagtgaaagtgatrcacacttttctgtggggacagcctctttgatggccatggtgctgtgacatcacaatgacatgatacgaaaccttgtctgagagctacctgcctctttggt

SEQ ID NO: 18628 - DNA, 201 bp, Homo sapiens
tttcacagacagctctttgtgtgtaataaaatccaggcaagtggtgggtggcagaccgcaggggagtagctgaattgggttaatgagggaaaaggtgctttttttttttttttttttttcatattctgccttaagctaataaaaagtttaagcctggacgttttcgatggttcatcctttatctctgacaaatatctgact

SEQ ID NO: 18629 - DNA, 201 bp, Homo sapiens
cacagagcttaaccggcaagtcctccagccaggagtgggaagaaatcaaaagcctattccagcccagccgtggagagcctacaagggctggtctgtgccaytggggcccaatgggagcacagaaacaaggcctgattctggtccagaatcaacatcccattcatggggccattcagccctggaggcttctctccaatggcc

SEQ ID NO: 18630 - DNA, 201 bp, Homo sapiens
ctttatagaacagagtgcattatttctgattgagtatagatatatagtaagtcttgtaatcaactgactgtccttaagtaatgatgcacatagtttatgtyatttagtattttggaaaagagccaaataattccgttttgtttgtttgttttcttaatcaaatgagtaatgcattttaccccgattgcagaaatttggccc

SEQ ID NO: 18631 - DNA, 201 bp, Homo sapiens
tgcctatcagggaagccctgagttggtactgcaggggcattactccagagttctctagtcggtctaggcacatcattgattccttcccagtagttgaagaygagggtgaagaaagaaattgattcccagcttttaagtcaagcaaaatacacgtcaagagttgaaatcacttgcagatagtttcaacttttttgcaccact

SEQ ID NO: 18632 - DNA, 201 bp, Homo sapiens
attccacttctaggaatgcatcctaaagcacaaagctttatgcctacagatttcatgacgatattatatacagtaatttcttcaaaactggaaataacatsccacaaaaggggcttggttgagtttgtttccatgtagtagggcactctgtcgcagttagtaatgatccacgcaaagttcttaattaagtggatcactgct

SEQ ID NO: 18633 - DNA, 201 bp, Homo sapiens
ttgattcccagcttttaagtcaagcaaaatacacgtcaagagttgaaatcacttgcagatagtttcaacttttttgcaccactcatttcgagaggctctayttttggcataaccttttgaatattcctgcttttattattagtcttgtgttttaaaaaataatacacattggttttaatgacttgaaaactggtatttcta

SEQ ID NO: 18634 - DNA, 201 bp, Homo sapiens
ttttcacagacagctctttgtgtgtaataaaatccaggcaagtggtgggtggcagaccgcaggggagtagctgaattgggttaatgagggaaaaggtgctttttttttttttttttttttcatattctgccttaagctaataaaaagtttaagcctggacgttttcgatggttcatcctttatctctgacaaatatctgac

SEQ ID NO: 18635 - DNA, 201 bp, Homo sapiens
tgctgcctctcattcattcattcacgaattgtctgctcttgggcaaatattggagtaggagctgagagtagagaaatctgattcccaacccccaaaagccygtagactagggaaggaatcagatacctacctaagtaagtcacagtcaacgtgttattctaattgtgcagataaaccttaggggagcacaggtcatgggag

SEQ ID NO: 18636 - DNA, 201 bp, Homo sapiens
tgattcccagcttttaagtcaagcaaaatacacgtcaagagttgaaatcacttgcagatagtttcaacttttttgcaccactcatttcgagaggctctacktttggcataaccttttgaatattcctgcttttattattagtcttgtgttttaaaaaataatacacattggttttaatgacttgaaaactggtatttctag

SEQ ID NO: 18637 - DNA, 201 bp, Homo sapiens
cttttcacagacagctctttgtgtgtaataaaatccaggcaagtggtgggtggcagaccgcaggggagtagctgaattgggttaatgagggaaaaggtgctttttttttttttttttttttcatattctgccttaagctaataaaaagtttaagcctggacgttttcgatggttcatcctttatctctgacaaatatctga

SEQ ID NO: 18638 - DNA, 201 bp, Homo sapiens
ttgcttatgatttaagaataaagtgatccctttagtaactccattttaaataggtgatcatgaaaggtattttctgccatgtatttgtatagtttctgagmaagtttaattatgtcagctggaacataattttttcatattttgtttacactgacaagccaaaagcgttggtcctcttttgaagaaaacttccatccagtt

SEQ ID NO: 18639 - DNA, 201 bp, Homo sapiens
aagcaagtccccagtggggcgggaaggacctggtatctcacactcacccatctctcccacctcccctaaaccagttcactggacaggcagaacaggcagascatgctggtgatcgtgacttgtggcaacaagaattcttatcgtcgttgcttttaagtagatattcacctgcaactgagtttacaggttcctatgtacagt

SEQ ID NO: 18640 - DNA, 201 bp, Homo sapiens
aatattaaaatcttctgactctgtctcttgcttcatcttctactaggagagttaaatttttattttatcttaaatttctatgagattgggctctttagatycaaactacgcaatccaaggattataggaccttttcattaatgaatttcctttctttagacaatatataaaggctggaaaatcttaacgtattatttagaa

SEQ ID NO: 18641 - DNA, 201 bp, Homo sapiens
aaagaaaaaggtaattgaacggtggcttggtcctggaatttccttagcatgctatgtgttctcatgcacagtcatcacttatgagtctcgtaccatccagwagcttcctactgcaaacgcagcaggctctgctcaccttaggcctcgaggaaggccctggattgagtggatagatttcccttagaagctgtctcctcttca

SEQ ID NO: 18642 - DNA, 201 bp, Homo sapiens
taaaatgtctttttagggttaagattactaaattacagtgtaagttttcagttactttggatttgcatagcttggactagattcttttcagtctcttactrtaactttaggtaatgtggctcttaataaaagccaattggaaaattttgttaaaggactgaagcacaataataatgtatttctttcatttctagaaattgg

SEQ ID NO: 18643 - DNA, 201 bp, Homo sapiens
gtgcttagaaagagccaatggtggccgggcgcggtggctcacgcctgttatcccagcactttgggaggccgaggcgggcggatcacgaggtcaggagatcragaccatcctggctaacacagtgaaaccccgtctctactaaaaaaaatacaaaaaattagccgggcatggtggtggatccctgtagtcccagctactcag

SEQ ID NO: 18644 - DNA, 201 bp, Homo sapiens
gtgtagggcagccgtgaactactgaatcttagaattcagtctcctgacctcctccctggaatttcagctcagattccgagtgctctagttgtgctttctgwtggggcttatctagttcgattgtacccttcaggtgaaagggatactccttctgcggtttcttgcaggaacctgtagctcagacctggggccaaaggaaag

SEQ ID NO: 18645 - DNA, 201 bp, Homo sapiens
gttagcaaattatggtcaccactctcatcaaaatcccatctttggtctcaaaacattatatgattttttcagattaaaaaacatgagcctttattaattayaatatttagtatgggatggtttgaaattaagagataataacctatcggagagatttccataaatagtcttgtaatgtgtcaagtataataggtattacac

SEQ ID NO: 18646 - DNA, 201 bp, Homo sapiens
tccaactccaccatactttccctgttttaccatactgcctccataagatccatcacagcataagtagcctaacaaacggttttatttcaaaagcaataaascaatatatatttattgtagagaagtaggaaactgagagaaagaaaaaaatgaaacccacacagacataggaccagtgtattaacatcttatcttcccaga

SEQ ID NO: 18647 - DNA, 201 bp, Homo sapiens
catccaactgggtgcttagaaagagccaatggtggccgggcgcggtggctcacgcctgttatcccagcactttgggaggccgaggcgggcggatcacgagrtcaggagatcaagaccatcctggctaacacagtgaaaccccgtctctactaaaaaaaatacaaaaaattagccgggcatggtggtggatccctgtagtcc

SEQ ID NO: 18648 - DNA, 201 bp, Homo sapiens
ggcagtgagcacagtgaggttcacagctcccctcctattaaaagcaggccacggccgggcgcggtggctcacacctgtaatcccagcaccttgggaggccsaggcgggcgggtcacttgaggtcaggagttcaagaccagcctggctaacatggcgaaaccccgtctctactaaaaacacaaaaaattagctgggtgtggt

SEQ ID NO: 18649 - DNA, 201 bp, Homo sapiens
tccctgtcttgtcctggaaactcaaagggtgggcaggaagtggagtgtgtgcctgcttcccttccctgtcttgtcctggaaactcaaagggtgggcaggargtggagtgtgtgcctgcttcccttccctgtcttgtcctggaaactcaaagggtgggcaggaggtggagtgtgtgcctgcttcccttccctgtcttgtcct

SEQ ID NO: 18650 - DNA, 201 bp, Homo sapiens
ggtgggcaggaagtggagtgtgtgcctgcttcccttccctgtcttgtcctggaaactcaaagggtgggcaggaagtggagtgtgtgcctgcttcccttccytgtcttgtcctggaaactcaaagggtaggcaggaagtggagtgtgtgcctgcttcccttccctgtcttgtcctggaaactcaaagggtgggcaggaagtg

SEQ ID NO: 18651 - DNA, 201 bp, Homo sapiens
agaggagttttttttttttactttataaaactaatgtattaactatattaataaaataacaattattttattttcaaaaaatgtctactctttttcattamagttgaatcattagttttttacattcatttatttgcccatttgattgttgtctcttcagttttctcttaatggaaatttgaactatgaaactgtacatac

SEQ ID NO: 18652 - DNA, 201 bp, Homo sapiens
tagaggagttttttttttttactttataaaactaatgtattaactatattaataaaataacaattattttattttcaaaaaatgtctactctttttcattmcagttgaatcattagttttttacattcatttatttgcccatttgattgttgtctcttcagttttctcttaatggaaatttgaactatgaaactgtacata

SEQ ID NO: 18653 - DNA, 201 bp, Homo sapiens
ttaacgagccactggttaatgataagaattttagaggagttttttttttttactttataaaactaatgtattaactatattaataaaataacaattatttyattttcaaaaaatgtctactctttttcattacagttgaatcattagttttttacattcatttatttgcccatttgattgttgtctcttcagttttctctt

SEQ ID NO: 18654 - DNA, 201 bp, Homo sapiens
tgggccacctgagcttgtgttctcatgtatggaactcagggccttcctctattgggcatgggattgaggtccctgatgggagggaagggacacagggttgtcactcgctttccagagtctcagaggactcaggacaacaaagtgtaaggactctgaacaaaagcaggtcctaaacacaacgcctggacattccttgagggg

SEQ ID NO: 18655 - DNA, 201 bp, Homo sapiens
ataaaacctttcacatgtgaaataccatatacagtaaaagcatcttccttaagcacatctatttaatttttttattaaaagtctttgaatgaggataagtmcaatagaatagaaatacccagtacagtgatagtaacacctttgcagtgtgtcttgttgtatagagagcaaggtatctgatacatctttatgaataaaggg

SEQ ID NO: 18656 - DNA, 201 bp, Homo sapiens
ttttttttttttttttttcatttttgagatgaaatttcactcttgtcacccaggctggagtgcagtgggatgatctcggctcgctgcaacctctgcctccygggttcaagtgattctcctgtctcagcctcccgagtagctgggattacaggcgtctgccaccacacccaactaattgttttgtatttttagtagagatgg

SEQ ID NO: 18657 - DNA, 201 bp, Homo sapiens
gaggtcgaggttacagtgagccaggattgtgccaccgcactccagcctgggtgacacagtgagacactgtctcaaaaaaaaaaaaaaaaaaaaaaaaagtmcagtcactttgagggcccagtgccaaataggttcttgataattgttgtttctttttctgcttactctctttgaacatgtagctgtaagttttctgttctt

SEQ ID NO: 18658 - DNA, 201 bp, Homo sapiens
aagaagattgtcagcattaggaattcctttaatttcatttgctttcagcaaacattggaattattgttaaactctcaaaactatcattcaatgaataatayctaattatcagttgtaaaaacattttattaatattgatgctattccaatgattgcatctttagctttccttgtttaagtattttttaggtagcgtcactt

SEQ ID NO: 18659 - DNA, 201 bp, Homo sapiens
ccaagtatacatgaaacagctatgaaaatggaccccctgttagctatatgggtgcaggcgggtagttggatttaacaatgactggagtttgccaagagagratgacaaagaggcacaaggcagatgagaatgtgtataaaggaacagttataacaatagaatttaagctatgtaaggagaatcatgtagacctgaggtgga

SEQ ID NO: 18660 - DNA, 201 bp, Homo sapiens
ttgtaatcaactgactgtccttaagtaatgatgcacatagtttatgtcatttagtattttggaaaagagccaaataattccgttttgtttgtttgttttcktaatcaaatgagtaatgcattttaccccgattgcagaaatttggcccttagaaaacccactaatgaaatgagcaaacaccttaaaagcttgattttttgt

SEQ ID NO: 18661 - DNA, 201 bp, Homo sapiens
caggcttgggagtgacacttctgtagaatttgacaaatgtacttccaaacccctgcttgaccacttccctgctgtgctaactccagccatgatactacatstttctgtatcttgctttcttcctaagagctgagtcctgtatatggacagcatatcccagtgtctggcatgtggtggggacacaatatacattcctttctg

SEQ ID NO: 18662 - DNA, 201 bp, Homo sapiens
agtttattacggctagaacatagggtgtgtggttgggagggacaaaagatgagacccaaatagacaggagggaccagattgggaatggtcacaaaaacaartttggacttcaagtttggggcagtggggcatctactaaggtgattaagccagggaatgatgtgataaaattcatgctaccaggagtcccagactaagggt

SEQ ID NO: 18663 - DNA, 201 bp, Homo sapiens
agacattgtacaagtacacagacaccagacaccaacctccaaaatccaagaggtctgtctttctgcagtccatggatgtgcagcaaatggcaggtgagctytgggctctgagaaagccaggcttgagtgcagtaccatttcttcctctcctgttctaaaactcagaatgcccaaagatattggaatagtcccatggattcc

SEQ ID NO: 18664 - DNA, 201 bp, Homo sapiens
tttagcacttccttcaggagctcttttagggcaggcctggtggtgacaaaatctctcagcatttgcttgtctgtaaagtattttatttctccttcacttaygaagcttagtttggctggatatgaaattctgggttgaaaattcttttctttaagaatgttgaatattggtccccactctcttctggcttgtagggtttct

SEQ ID NO: 18665 - DNA, 201 bp, Homo sapiens
ttctggatttaaaaagatttctttggtccctaaatgtttcccaagtcatagagtcctgagtcagacttcaatctttttattttctgccagaaagatgaggkgtaagaaggggtaggaacaaacacatcttattcacaaacaacaacatcatcagtaaacaaatgtggaaaaactgtccatactcataattaaagtaatgca

SEQ ID NO: 18666 - DNA, 201 bp, Homo sapiens
ccagctactcaggaggctgagttggtaggatcatttgagccagagaggttgaggctatagtgagctataattgtgccactgcactccatcccgggcaacaragtgagactctgtctcaataataataataatagaaatactaacttctaagtggcatggatttaagaccacctgattgcacggccctttcatttccagttt

SEQ ID NO: 18667 - DNA, 201 bp, Homo sapiens
cgttagtttcttcattggtaaactggatgataatcatatctatcttaaatgtttatcttgttttgtttgtacaatgctctttgaatcactttttttttttwaaaaacatataatcctgtacgtatagtgggccagtgggccatgagccaccatgcccagaccattctttattcttattctttattcttttttattcttatt

SEQ ID NO: 18668 - DNA, 201 bp, Homo sapiens
caaaacatttcttaagcttatagttattcacaatataaccaatgtaaatcagctggaagattctgattagagagacggtagagataatatttaaacaagayttgcaacttgtatgttgaagattgccttgttcttttggtgagagctcctgtgtatgaaaactttcatgttactttcttcaaaattttgataagccagaga

SEQ ID NO: 18669 - DNA, 201 bp, Homo sapiens
caaaaaaaaaaaaaaaaaaaaaagccagtcatggtggcacatatctgtagtcccagctactcaggaggctgagttggtaggatcatttgagccagagaggwtgaggctatagtgagctataattgtgccactgcactccatcccgggcaacagagtgagactctgtctcaataataataataatagaaatactaacttcta

SEQ ID NO: 18670 - DNA, 201 bp, Homo sapiens
ccaacattgtatgacacaaatgtataatatttacaggaagtataaaacaaatgataaattttgattttttttgcatcattattaggcagagaaacataagmagcagtgtggtgtataaaatgtgactttgattccacaaaggttctgccagtctttcgacagtggcttgtttaaaccatgggtcttcacattggaattgag

SEQ ID NO: 18671 - DNA, 201 bp, Homo sapiens
ttctttgcatttcatcagtgattgcttataaaccagtaaaaattactaatactcatttttaaagtgggctaagaatatgaatagaccatttgtctattatrtaaatatagtgaagaaacatatgacaaaatgttcaaccttagtcctgatcagaataaaaataaaagtaaaataggtacaattttaaagctactaacttga

SEQ ID NO: 18672 - DNA, 201 bp, Homo sapiens
tgttaatgtttcagtatatttacttccttattgtcttcttttgtgtgtgtgaatgtgtgtgtaaataaaatataaaaactttttttctgaactctcagctrtatgtgttttcctcactctctccaattattcattaagctttccctaaaattattaatgttgatttgcagaaatcattttagttgctatgaattattacat

SEQ ID NO: 18673 - DNA, 201 bp, Homo sapiens
attttcaactgtgtaacttcagtcagtttcagatttcagaagtggtataacatgaagcccagactgtgggcctgaatatatgtatgtatgtgtatgtgagsggggggagctgggggttggtaggtagaaatgaaaaggtgtttgtaaaatgagaatctcttaaaattgatttatcaaagattatttacataaattgtgtga

SEQ ID NO: 18674 - DNA, 201 bp, Homo sapiens
gcttcctatgaggattaaacaaggaggcatgtagactttagcacagtgcatggcaatagtaagtgctcagtcaatgctatttcttcccttcttaatccgawctatcatccaatcatttttttcagcaccatcattcactggatgtttcctctgtgccagatactctggggaacactggtaatgagtgtaacccccatcatt

SEQ ID NO: 18675 - DNA, 201 bp, Homo sapiens
tccctgtcttgtcctggaaactcaaagggtgggcaggaagtggagtgtgtgcctgcttcccttccctgtcttgtcctggaaactcaaagggtgggcaggargtggagtgtgtgcctgcttcccttccctgtcttgtcctggaaactcaaagggtaggcaggaagtggagtgtgtgcctgcttcccttccctgtcttgtcct

SEQ ID NO: 18676 - DNA, 201 bp, Homo sapiens
accccaacatggtacctacacatattgtggttttgtctttggagggggcattcttatttttatttcacgtcaagttgcagagctgctattaggattcagcrgaggcattggtatctaagattgtgacaatctgggctttatctctgagaaatgactgaaaaaaaaaatgtgtccttgtgatttttcccactccgtcattga

SEQ ID NO: 18677 - DNA, 201 bp, Homo sapiens
cagaacaaaaaagaataggaacccggagctggagaggtagttcagaagtgaacacttgaatttgagagtcatttaccttgtgctgttaattgaaactaagktataggtaaactgctaatagaggaggacgcagagagagaaggagaaagataaagtcctggaaaggagttgagaaggggcccagaaatagagcagtgagag

SEQ ID NO: 18678 - DNA, 201 bp, Homo sapiens
tggccattatattctgacagacctggatgtgagtcccagttctgtcacttactgtcgatgtggccttgggcaagttatttcacctctgaaactgtttcctwatctgtgaaatgtggtgatgagtgtatatgtgtatcaacacacacgcactctttcctttaaaacaatactttgcaagggtctaaaccccaacatggtacc

SEQ ID NO: 18679 - DNA, 201 bp, Homo sapiens
cttgtatgatttgacagtacagtcagatggtaaaagaacttctgtactgtatgatgtttcagaatagttctgtaaagtgtctgaatgtactctggtaccaytgttgtgtttaatttgtccgaggcagcctcaggtaaacactagaatctgttgcagcaagatatgcaaagtaaaatgaaatatgtatgtgagattgtatta

SEQ ID NO: 18680 - DNA, 201 bp, Homo sapiens
tctgttcacctggggagatgcacccagcatccactgggtagctgctctctgggtgggtgttggccattctgtggcacagttttccttcccttcccttcccygctgtgggtgggaattagagggctagatgggaggctgggaggacttagatgccttcccctgtgaccgtcgcgagtccacactcccagccacacgtgaccg

SEQ ID NO: 18681 - DNA, 201 bp, Homo sapiens
tgtttattccttccctttcccaaaagataatggagaaggaaaaaagtaagatgagttccacccagctgaaaatgaaactactggaagaacgattgttgccrttaccccctgaaaagcagccctgcatttcagctgctaagaaaagcaagacactgtttgctctttccttctactcacatgtccggcatctgtctagagtag

SEQ ID NO: 18682 - DNA, 201 bp, Homo sapiens
gatttgaaggactggtggcaggaaagctttggccttggggtgtgaattctaagaaatagaggcacaattaagtttaaaaaattcaaggactttgagcttgrtaatgaaagatttttctctagactaatgtgagcagaaaagttgcccatctgtgcacatttttgtgtgcatttaaaatatttaaaagctgacagcttttaa

SEQ ID NO: 18683 - DNA, 201 bp, Homo sapiens
gcttataggaccagcatgtgtgttgtgaagggccatggcccgtgagggggctggctggaaagaaggggcttcttgtggtggggtttatcgggggcagggccaggtcttgaatggcatgctggggacagggatgtgagcaactctcctgggctgccagtggcagggaaagcagttggaggctcgtggtggcctggccaagga

SEQ ID NO: 18684 - DNA, 201 bp, Homo sapiens
ttttgtatgtttggattttgtgtgtgttctgtttttaactttcaacttgagttttaagatcgtcaatcaggcttttctttcaagtcagtggcactgcttgyaattgcaggacttagagggtcagcatttcccttatggtattaaaaaaaattaaacatagggagtattttaggaatttgagctccactgatcttttcatca

SEQ ID NO: 18685 - DNA, 201 bp, Homo sapiens
tcggttcagcagagcaagagaaatccagcaaaaggcagtgacttgttctgcggcgcctgcacgcgctttagaatccccgcacgcggcgccaggttgtgagrgacaggatcctgagtcccccaaggctccaccttcagcggtgtgacagcggggcttctctgccaaaggactggccagagcctacaaacggcatttctttaa

SEQ ID NO: 18686 - DNA, 201 bp, Homo sapiens
tcaaaatatatttaaatcaggattttaaagcccccactcttggagagtggtacttttcatattcgaataattttatttttctttgggaaaagatgataagrcatgaatgtttatgtgtaaggaaaacatcagtattaagaaaatgggtttatttaattgatttattaaattggtttattgcagtttttatttacagagaac

SEQ ID NO: 18687 - DNA, 201 bp, Homo sapiens
ttgtagagacagggtttcatcatgttgcccaggctggtctcgaactcctgagctcaagcgatctacctgcctcagcctcccaaagtgttgggattacaggygtgagccactgcgcccaacctagaccccatttttttattttgcctcatttattggccttgcctcttctgctacggccattctcaggcaggctttcccctc

SEQ ID NO: 18688 - DNA, 201 bp, Homo sapiens
gaatatgcaaaagatctagaatagccaaaacaatgttgaaagagaagaacaaagttgtaggacttatattacctgtttgcaagactcactataaagttacrgtaatcaagacagtgtagaaacacatataaatcaatagaacaaaattaagagtccagaattagacctacacataagtggtcaattgatttttcaacaaat

SEQ ID NO: 18689 - DNA, 201 bp, Homo sapiens
tttctctccacaggaagttctacagactttgaccaagttttgtttccccttctatgtggacaggtagtgtcagattttcaaactttactagaaaaaaagtrtcaataaacctgctatagaaaataaaaaccataccattcttaacattctgtctgtttaaccatgatttaagatacctgtgttccaaggagagttgcaata

SEQ ID NO: 18690 - DNA, 201 bp, Homo sapiens
caacttccttgacttgaataaaacacgggacccttattgcatgagtggccccatccatgttccaaatgacccacgtgtatagtcagctgccagcttcagcyaccggagccatggcctgccttttgcacattgtggtttttcttttcctgataatttgacttcagtcatcagaagcacaaattaaatgtaaatttctggatt

SEQ ID NO: 18691 - DNA, 201 bp, Homo sapiens
aattgtgtgtatagttctttctttagctattatcaaatacaaaagtcttctagaatagttagcaaactgagctgctaatattcaagtctgttttacatgtkcccaagacatattatattactgctgagatctgtagtaaggaggacattttatattctggggaaagaaaggatttttgcttgaattttatttgttgaatgg

SEQ ID NO: 18692 - DNA, 201 bp, Homo sapiens
caattaaaatagtctgaggttttttttttttctttttaacgagccactggttaatgataagaattttagaggagttttttttttttactttataaaactartgtattaactatattaataaaataacaattattttattttcaaaaaatgtctactctttttcattacagttgaatcattagttttttacattcatttatt

SEQ ID NO: 18693 - DNA, 201 bp, Homo sapiens
tctttaatcatgggtatcaaaagttgctgttattagctccctactacgtataagatctctaccaggagatagaacagagaatttgaatgccccccaccttwtttttttcttgagacagggtctcactctgttgcccaggctggagtgcagtggcctgatcacggctcactacagcctcaacctccccaagctctggtgatc

SEQ ID NO: 18694 - DNA, 201 bp, Homo sapiens
cgggacttggggctccagcactctccagcgccctttcttgagctaatttaggatttggctgcacctgacctctcacatagcagtagaaaatatttccttgktttttttttttttgtccttctcccctttccctcctcccctttatctggcaacgaatgtacctcgtgactccccagatgcctctaatatagacatctcaag

SEQ ID NO: 18695 - DNA, 201 bp, Homo sapiens
tagacttcaacttataatttaaatcagcctagccctatcttgtttaaaagtattcagcagggaatattgctaaatagtattttatattttgtttaagtggytaagaatggtatctctgggaaaaagagaattttctatagattttgagattaaaagtacaaaaccacctaaacatttccttagtatttacattgtgataaa

SEQ ID NO: 18696 - DNA, 201 bp, Homo sapiens
acagttgtctgaacaacctggagttaaaaaacaagttaaaaaacagcaagtatgttcctttttatagtattacagttttttttggttttgtttttaaaaascaaagtatttgcttcctttcagtaagaatgttaggatgacgtgtagtgtatttcactgaatttgtttgaaagattgagatgctgatatatacaaagcact

SEQ ID NO: 18697 - DNA, 201 bp, Homo sapiens
gggaaatatgtgtgcatgtgaaaagtcaggttacatttatgctttatttttctatcaagttatatatatacatataaaccttgagcacattctaatatctkcatttcaaatccaactttgtataagtcatgttggttttctgttaacttcaactgtaagaaaccagccttccccatgtcttccaagtagccttgggttcag

SEQ ID NO: 18698 - DNA, 201 bp, Homo sapiens
actatatgaaagatatgacaacttgataaaaagaacactgcctgaactgactaattttctttttcagaaaatgtagaattaattctgagttgttcccagamaaacacactttgggcacatgaataattcaacctatatatttttttcttccacttatgtgtcacagtttaacaagaacccagtgatcaatcctcagctacc

SEQ ID NO: 18699 - DNA, 201 bp, Homo sapiens
tccttccttgttttagttccctatgctgtaaaatggggataaatggggatgatgataatatctcatattatcatcacatttgaggattcagaaacacagtwtttaaagaattaagcacagggcatggcacagagtttctctcagtttgaactatcatgaagaaaaacatgaaatttgttttgatccttcaaactggaaatt

SEQ ID NO: 18700 - DNA, 201 bp, Homo sapiens
taaagtcaagctcattagcagggcaaatgaggtcttccatgctccatcctttccctatccagcttcatcttagtccactcctctcctctccttttaaataygcatttcccaatatgtctcaaccaaatttcatacattttttaaaatttccatattatatttggcttcccccaaatgtaagaaggtctaatatctttaaaa

SEQ ID NO: 18701 - DNA, 201 bp, Homo sapiens
ccttagtatttacattgtgataaactgtttcttagataggtacaaatatgagaactctaagacaattaaaatagtctgaggttttttttttttctttttarcgagccactggttaatgataagaattttagaggagttttttttttttactttataaaactaatgtattaactatattaataaaataacaattattttatt

SEQ ID NO: 18702 - DNA, 201 bp, Homo sapiens
taggtacaaatatgagaactctaagacaattaaaatagtctgaggttttttttttttctttttaacgagccactggttaatgataagaattttagaggagytttttttttttactttataaaactaatgtattaactatattaataaaataacaattattttattttcaaaaaatgtctactctttttcattacagttgaa

SEQ ID NO: 18703 - DNA, 201 bp, Homo sapiens
cataatagagactgatcaagttcatttagaagatgtttatgcgtaccgactggcacttaaaaagctctttgtttccatattctctttgggagagctttgaytggggccttggctagtctagaaaaggaccatagctgagtataatctgttcaggctctcagtaattttacggaataccagtgcagtccaccggtgtaattt

SEQ ID NO: 18704 - DNA, 201 bp, Homo sapiens
tcgcttgaactcgggaggcagaggttgcactgagccaagatggcaccactgtactccagcctgggtgacagagtgagactccatctcaaaaaaaaaaaaaaggaaaagaaaaaaaatagcagatggagaaactctgcaaataggaatttcaaaactgatggctcttgctccgtgccactgacccacctctcccctctgcac

SEQ ID NO: 18705 - DNA, 201 bp, Homo sapiens
ttagctctatacggataggatttttttttttttaactcagggtatcgtcttcttgactcataaaacatggtttggtaaaagcaaacttgcttatcaaacarcataagcataaaatcgattggatagtatattttatttttgatcatccccgttctttaattattttaaaatttcagtttgctattgtttaaggtcactgtg

SEQ ID NO: 18706 - DNA, 201 bp, Homo sapiens
agcttctgagttaatattggctagatttaagcaggaagaactcttagaacttacggaagctcgacagtaaatttaacactcatgcaactcattaaaatagkataaaagtggagcttcaaacatctctgtgtttgctaccagggctggggggtggggtgttacccttaattcagctcaagatctgaaagtctgatctttcag

SEQ ID NO: 18707 - DNA, 201 bp, Homo sapiens
tctcgtacacaaaataaagtttgcattgttttccttcttgctccagcagccaggaagctcagagctaattttgtaacttaacttagatgccacataggacmtacatacccagctacttttttcccaaacaaatactttttatatatctatgtatttggcagccctgatgtttttctttgttgttttagatgctcatataag

SEQ ID NO: 18708 - DNA, 201 bp, Homo sapiens
tgcatatttattttatatttggtcttgcatattatgttgccagccctggtaagacccaatctccaccctcaggggaaacagttatttgttgaaagtctatkgtgaaagaatctatttgtttatcatctgttttactcttcaaagcaaccctgtgaggtaggttggcattgtataattgtcacagacgaggagggacaagtt

SEQ ID NO: 18709 - DNA, 201 bp, Homo sapiens
gtgcagatagcaagaagtgaaataggccaggtgcagtggctcacgcctgtcatcccagcactttgggaggccgaggcaggtggatcacttgaggtcagttygagaccagcctgaccaacatggtgaaaacctatctctatgaaaaatgcaaaaattagctgggtgtggtggcaggtgcctgtaatcccagctactcaggag

SEQ ID NO: 18710 - DNA, 201 bp, Homo sapiens
ctgcaacctctgccttctgatttcaagcgattctcctgcctcagcctcctgagtagctgggattacaggcgcccgccaatatgcctggctaattttttgtrtttttagtagagatggggcttcaccatgttggccaggatggtctccatctcttgacctcgtgagccacccacctcagcctcccaaagtgctgggattaca

SEQ ID NO: 18711 - DNA, 201 bp, Homo sapiens
tggccctgtcattgcccagttcttcaccctcaggcaagtgacgtcccctttcagagccttgatttccttatctgtaaaatggagatcatcatcctacctacctcacgcgatgctgtgaggagtaagtgagctaatgcatgtaaaaccacccagtgctggtttagggctcagcaagcggtagctgtttttaatcactgcacc

SEQ ID NO: 18712 - DNA, 201 bp, Homo sapiens
ctggccctgtcattgcccagttcttcaccctcaggcaagtgacgtcccctttcagagccttgatttccttatctgtaaaatggagatcatcatcctacctacctcacgcgatgctgtgaggagtaagtgagctaatgcatgtaaaaccacccagtgctggtttagggctcagcaagcggtagctgtttttaatcactgcac

SEQ ID NO: 18713 - DNA, 201 bp, Homo sapiens
tctggccctgtcattgcccagttcttcaccctcaggcaagtgacgtcccctttcagagccttgatttccttatctgtaaaatggagatcatcatcctacctacctcacgcgatgctgtgaggagtaagtgagctaatgcatgtaaaaccacccagtgctggtttagggctcagcaagcggtagctgtttttaatcactgca

SEQ ID NO: 18714 - DNA, 201 bp, Homo sapiens
gtaaagactggtttactcttctaattccattttgcctaaactagccttgagttgtttgtgttccccaagtgtttactcccagcaagatggaggcagcccaygcatgctggatggcagcaggaagtcaatcttggatttcagaaattgccatagataagaatcagctgcaaataatcatggcccaacccataagagacagtg

SEQ ID NO: 18715 - DNA, 201 bp, Homo sapiens
cagtccttcaggccaaagacaggtcaagtgaagaaactgctgcctatcagggaagccctgagttggtactgcaggggcattactccagagttctctagtcrgtctaggcacatcattgattccttcccagtagttgaagacgagggtgaagaaagaaattgattcccagcttttaagtcaagcaaaatacacgtcaagagt

SEQ ID NO: 18716 - DNA, 201 bp, Homo sapiens
cacttcttacatggcggcaggcaagagagagaatgagaaccaagcaaaaggggtttccccttataaaactgtcagatctcgtgagacttattcactaccaygagaacagtatgggggaaactgcccctgtgattcagttatctcccaccgggtccatcccacaacatgtgggaattatgggagctacatttcaaaatgaga

SEQ ID NO: 18717 - DNA, 201 bp, Homo sapiens
gacagacagacataacatacacccagcaagatgaaaagacagctagtttcccagaaaacaggagctgactgtgacttctgtgggcttatggaggaaggagstggtgtgaaaaccagatgggagagttgttaagagttgtatgtttccaaaattgcctttgtagctcctttgcaaaaatttggaccatgcatgctggaggga

SEQ ID NO: 18718 - DNA, 201 bp, Homo sapiens
ggactgcagtggtgatcaagaacctctccactctcatgattttacagtcaagcttagtgtcagatcctctttgtccctcagtttactaatgacgcccagaraggctgtcacttgccaactatctgaccagatctgatagtagtatctgggttgcctggccaccgggtctctcaaataaattttatatgtaatactgctaag

SEQ ID NO: 18719 - DNA, 201 bp, Homo sapiens
actcaggaggctgaggcaggagaattacttgaacccaggaggcagaggttgcggtcagccaagattacaccattgcactccagcctgggagacagagcgasactccatctcaaaaaaaaaaaaaaaaaaaaaaaggaaagaaagtaaacgttaccccattttacagagcggaaccctgagcttggagaggctgagtgcaaa

SEQ ID NO: 18720 - DNA, 201 bp, Homo sapiens
gaagttaacaaccttgggagaaactgaggcagtccccgagcaggatttggaaagcaatttcatttaaaaggggctggagggaggggggaggcactcgtgtkcatttaatctttttttttttaattatttttttttaagttccacggtacatgtacaggatgtgtttgttacataggtaaacgtgtgccatggtggtttgct

SEQ ID NO: 18721 - DNA, 201 bp, Homo sapiens
ccaagatcgcgccactgcgctccagcctgggcaacagagcgagactctgtctgaaaaagaataaaggccgagcactgccactcatgcctgtaatcccagcyctttgagaggccgaggcaggtggatcacttggtgccaggagttcgagaccagcctgaccaacatggccaaatcccatctctactaaaaatacaaaagaaa

SEQ ID NO: 18722 - DNA, 201 bp, Homo sapiens
tgttctctgcacagcaggaacctctgcttcaaggccattgtcccagggggtaattgttcctttatggggctgcttgactatcctcaggtagctgactgtgwtagctccaggggctgatacccagtaggctctcaacaactactcactgaatcagtgaatgaaaggcaaaaacagccacccttcctcacaaatttgggaaag

SEQ ID NO: 18723 - DNA, 201 bp, Homo sapiens
tgaggtcaggagttcaagaccagcctgggcaacatggcaaaaccccgtctctactaaaaatacaaaaattatcctggcgtggtggcacacacctgtaattycagctactcaggaggctgaggcatgagaatcgcttcaacccgggaggcagaggttgcagtgagctgagattgcaccactgcactccaacctgggcaacag

SEQ ID NO: 18724 - DNA, 201 bp, Homo sapiens
gtatgggaactaacatatgaggtgggggtgaggagttggatatcagggatggtttcaccaaggtgcttgcaccagcactgggctctaaggacaaggaagaygatgccagcacactcatgctcaaggcttgctggctggacacatgccgtttagttggtgccaactttccaagaggctcctgttggccatggctacaggtta

SEQ ID NO: 18725 - DNA, 201 bp, Homo sapiens
tctgttgactagtcagctgagacccagcaagctaacattatactagagcgttcatggcagaccctcacttataagctccttgaaggcagcagctgtgcaargtaaggccccacaatgcgggtatccagccactggaattacctgtgaggctggccagaacaagccttgacctcccagaagactacctgaaggaggaaatgt

SEQ ID NO: 18726 - DNA, 201 bp, Homo sapiens
aaggactcagaaattagaacctgtattagggttctctagagggacagaactaacaggacatacatatgtagatatagatgtagatatagatatagatatatggagcctgtattatagtcagggttctctagagggacagaactaacaggagatagagatatggagcctgtattagtcagggttctctagagggacagaact

SEQ ID NO: 18727 - DNA, 201 bp, Homo sapiens
gcacagagcctaactcacagttaaccctgtgaacatctggggagggcaaggaagccatctctgagaggccttctcaggctttctatgtagaattcatctcygtcttcctctcttgctctgaaggagtccctcggaaatcttctcttccagctgtttctttagagttacgtgtccctctcccgtaaggtagtaagatccagc

SEQ ID NO: 18728 - DNA, 201 bp, Homo sapiens
aaaggactcagaaattagaacctgtattagggttctctagagggacagaactaacaggacatacatatgtagatatagatgtagatatagatatagatatatggagcctgtattatagtcagggttctctagagggacagaactaacaggagatagagatatggagcctgtattagtcagggttctctagagggacagaac

SEQ ID NO: 18729 - DNA, 201 bp, Homo sapiens
gaccccaaagccctggcccccatctttactgtgccccttcttccaagctcccagatattttgaatagtgtttggctttaatggtagttgaaactcttttcrtaagaaaaaaattgttgacctttggtaagacatggtacagagtaaaagaatgggcttagagataagagagacctggattgaaatcccagctctgatcttg

SEQ ID NO: 18730 - DNA, 201 bp, Homo sapiens
aaaaggactcagaaattagaacctgtattagggttctctagagggacagaactaacaggacatacatatgtagatatagatgtagatatagatatagatatatggagcctgtattatagtcagggttctctagagggacagaactaacaggagatagagatatggagcctgtattagtcagggttctctagagggacagaa

SEQ ID NO: 18731 - DNA, 201 bp, Homo sapiens
cactgtactccagcttgggagacagagcgagactttgtctcaagaaaaaaaaaaaagagagagagagactggttaagtgatttgcccaaaattgcatctartaagggactacacttgcccattggaccccaaagccctggcccccatctttactgtgccccttcttccaagctcccagatattttgaatagtgtttggctt

SEQ ID NO: 18732 - DNA, 201 bp, Homo sapiens
aaaaaggactcagaaattagaacctgtattagggttctctagagggacagaactaacaggacatacatatgtagatatagatgtagatatagatatagatatatggagcctgtattatagtcagggttctctagagggacagaactaacaggagatagagatatggagcctgtattagtcagggttctctagagggacaga

SEQ ID NO: 18733 - DNA, 201 bp, Homo sapiens
ttaaaaaggactcagaaattagaacctgtattagggttctctagagggacagaactaacaggacatacatatgtagatatagatgtagatatagatatagatatatggagcctgtattatagtcagggttctctagagggacagaactaacaggagatagagatatggagcctgtattagtcagggttctctagagggaca

SEQ ID NO: 18734 - DNA, 201 bp, Homo sapiens
cacatccaggctcttgggtagacacttgcccaagatcagtcagcccagcctgctgggccttaaaccaaatctgggttctccacaccatcgtgacccctttwtcagctggaggagatcatctctcatatacggaaatccctgtatctcaatattaagacacttaccaaatattgtaaccaggaatctcccgaacattttttt

SEQ ID NO: 18735 - DNA, 201 bp, Homo sapiens
aggctggagactcccacatccaggctcttgggtagacacttgcccaagatcagtcagcccagcctgctgggccttaaaccaaatctgggttctccacaccrtcgtgacccctttatcagctggaggagatcatctctcatatacggaaatccctgtatctcaatattaagacacttaccaaatattgtaaccaggaatctc

SEQ ID NO: 18736 - DNA, 201 bp, Homo sapiens
gttaaaaaggactcagaaattagaacctgtattagggttctctagagggacagaactaacaggacatacatatgtagatatagatgtagatatagatatagatatatggagcctgtattatagtcagggttctctagagggacagaactaacaggagatagagatatggagcctgtattagtcagggttctctagagggac

SEQ ID NO: 18737 - DNA, 201 bp, Homo sapiens
cttttctccctgccccctgtatcgtaagcgttaagaaaggcccacaagtagttgccaaacaatagattgtgacctgctggtgggtaataaaaccagtttartgggtcttgaagtgaatttttaaaaatgaaatggaataaaatagcaattatcagagaaaataacatatagtaaggacaggtatagttttctgaaactttc

SEQ ID NO: 18738 - DNA, 201 bp, Homo sapiens
aaagcttcacagtagcaatggaaactgtcttttaactctctgaacactagtaattttaagacaaaaaatatttatttatttatttatttatttatttattwtgagataggttctcactcccattgcccaggctgcagtgcagtggcctgatcatggctcactacagcctcagccccccaagtagctgagggctgcaggagt

SEQ ID NO: 18739 - DNA, 201 bp, Homo sapiens
ttggttccttgatcataactagttctttccagtccccagaatctctgcctagttcttttctctgcctgaaacaacccagtgccctgtttcttgagtggctkctccatttcatcctttggtcaatattgttgccatccctgagaagctacctctgaccacattatctcagtagggcctttccttcccttccattttcctcta

SEQ ID NO: 18740 - DNA, 201 bp, Homo sapiens
tggcttgagtccaggaagttgagaccagcatgggcaacatgatgaaactctgtctttacaaaaaaatacaacaattagccaggtgtggtggcatgtatctstggtcccagctacttgggaggctgaggtgggaggatcacttgagctcccacagagctcaggagacggaggttgcagtgagtcaagatcacgccactgcat

SEQ ID NO: 18741 - DNA, 201 bp, Homo sapiens
ggctggagtacagtggcgcgatctcagctcactgcaagctccacctcccgggttcacgccattctcctgcctcagcctcccaagtagctaggactacaggygcccgccaccacgaccggctaattttttgtgtttttagtagagacggggtttcaccgtgttagccaggatggtcttgatctcctgacctggtgatccgcc

SEQ ID NO: 18742 - DNA, 201 bp, Homo sapiens
actggttatatgtttgcttttctgaggaaaagtgaaaagttataattgggataaggcattttagtctgcattgagaatggaaggaatctttgagggatccrtagtgaatgtgtgtgctttattgaatgagtaagacttgaagtgggctggactaaattgctgaaggcaaatctgttcatggtagatttagagagggggaaa

SEQ ID NO: 18743 - DNA, 201 bp, Homo sapiens
agcactattgctcttgctggttgggaagaaaggaagcctatagtctactaagacaggtaagatgagcgtgcaaacaattagaattataacatttaagaacrcttatgtccccagccaggcccggtagctcacacctgtaatctcatcactttgggaggctgaagcaggcagatcatttgaagtcaggagttcgagatcagt

SEQ ID NO: 18744 - DNA, 201 bp, Homo sapiens
atcatgaggtcaggagatcaagaccatcctggctaacacagtgaaaccccgtctctactaaaaatacaaaaaaattagccaggtgtggtggcgggcgcctrtagtcccagctactcaggaggctgaggcaggagaatggtgtgaacccgggaggcggagcttgcagtgagctgagatcgtgccactgcactccagcctggg

SEQ ID NO: 18745 - DNA, 201 bp, Homo sapiens
gggatgcgtttggagcatgaggtatgtggaagagcagaggcaaagtgacacagaaggactctaggaaaggaagccagggtcagctttgggagggtgcgttwgctggttaaggagctctccctttcctcacccctattgggcccttgtgtgtgccacatatgttgccaggtgcacaatgttgaacaaaacagacaccattcc

SEQ ID NO: 18746 - DNA, 201 bp, Homo sapiens
tacagtcaggttttgtttttgttttgagacagagcttcactcttgttgcccaggctggagtgcaatggcgacatctcagctcaccacaacctccgcctccyaagttcaagtgattctcctgcctcagcctcctgagtagctgagattacaggcatgcgccaccatgcccagctaattttgtatttttagtagaaacagggt

SEQ ID NO: 18747 - DNA, 201 bp, Homo sapiens
gcatccctgagcttctgattaggggctgggctcttcctggggcgtacagagatgagttcagcctctggccccttgagctcctggtgagaggggataccagygaagactatcccagcacccaggagtgcacacggcactgggatgagtgactgccactcagaggcctgcatgtgtcaggaggacagtccaggcagaaggaat

SEQ ID NO: 18748 - DNA, 201 bp, Homo sapiens
ttcccctcttctaaaatatgatgtaacaacattccccatgtaagattgcttggggcagccaggcatggtggcacatttaagaccagcctgggcaacatagygagaccccatctctacaaaaaataaattagctggatgtagtatcacatgcctgtggtcccagctacttgggaggctgacaggaggaccacttcagcccag

SEQ ID NO: 18749 - DNA, 201 bp, Homo sapiens
tgcctggcatcgagctctgagacctctttaccatcaggccaaacagtgtcagagacacactgagaccacacaaggctcctgtggctggaagcagggttcarctcatttcgtggttctttaaccagcatccctgagcttctgattaggggctgggctcttcctggggcgtacagagatgagttcagcctctggccccttgag

SEQ ID NO: 18750 - DNA, 201 bp, Homo sapiens
cagcccaaatgtccatctgcagatgaacagatcgataaaatgtggtctatccatacagtggaatattatttagccataaaaagtatgaagtcttgacacaatgctacaacatggacgaaccttgttcataaaagcactgtgctaagggaaataatctgatggcaaaagactacctattgttaattccatttatatgaaatg

SEQ ID NO: 18751 - DNA, 201 bp, Homo sapiens
ttcattgtgtgttactgagctcctaccctcatcctggcactgagctagaaacatgagtgaacagaacactgtctttgcccttcatgctaagagggagaggygtgcggagaactctcagtgcaggtgttaagtgcaaatagaagcctgttcaagtgacccagaagggggagagattaactccatttgagagagcaggatagg

SEQ ID NO: 18752 - DNA, 201 bp, Homo sapiens
ctgccttggtagtccacagagctgtagggaactgctggcctgggcatcaggagtgccggccctgcctgagcgcctctcttctctgggcttcagtttcttcrtctttaaaatgacagcacggggtcagcaggtctccaaagacccatggctctgcctccctcagattctgtattcagtagagcagaaagtacatgatgttct

SEQ ID NO: 18753 - DNA, 201 bp, Homo sapiens
attgattttcctgcctcagcctcccaagtagctgggactacaggtgcacgccaccatgcccagctaatgtttgtatttttagtagagacaaggtttcaccrtgttgcccaggatggtctcgatctcttgacctagtgatccgcccacttcggccacccaaagttctgggattacaggcgtgagccactgcctggccaataa

SEQ ID NO: 18754 - DNA, 201 bp, Homo sapiens
gtgagaacgtcttctgcgaagtcttgtttgcctcgcttcttttccctcagagccaaaatttgtccacagtacattcagtatccatgagccatcttaatttkgcagctgctctgtgtgtacgggcttgtgtttgagtgtgaggatgatcatgtgagccatcccctactcacctttaagacagtgcccctagtatatcagatc

SEQ ID NO: 18755 - DNA, 201 bp, Homo sapiens
tttttctccagagcagtggagaagagctgagaaatcttaaggtgccagcattgatggaaagagatagataggattgtcttagaggtgaacactcaatagtmtgccatccactcccaggccccagaagttgcaaccaagtgataaaggaaaaacactctacttgttgagcactaatgtgtattaaaagggtattttcattct

SEQ ID NO: 18756 - DNA, 201 bp, Homo sapiens
tcagacaggcttagtcagctagcaagtggcaatttagaagacagacctgtctgactctccaactccatgtactgtccaggaaagccaggtgtcccatctcrtgctttctgttggtgagaacgtcttctgcgaagtcttgtttgcctcgcttcttttccctcagagccaaaatttgtccacagtacattcagtatccatgag

SEQ ID NO: 18757 - DNA, 201 bp, Homo sapiens
taacatgtataaagatgtaatcaacaggttcaacccacttgcctagacacccactctgggtccagctctggggtaatacaaggagcacaaggatcaataaraggtcatctctgcctttgaggaactccacggtggtgagagatgaggaggaggttgtgtagcgactgtgttttcctgggctacagcagagaagtgggaagg

SEQ ID NO: 18758 - DNA, 201 bp, Homo sapiens
cagaaccaactcgtgaacccatgggtttctaacccgaagtctatttcttggggtttaccccaccaatatttctttcactttaagaagttattttcccatgrtgtaggtcaaatcccaccagactctgcagtcctcaaggacaaggactgtgtcttattctctgaatccccctggtcctggcccccaaatacttagttgttc

SEQ ID NO: 18759 - DNA, 201 bp, Homo sapiens
ccttggtgtgtcctcttagcaaccagggaaagatgtgccgatctcaactgagaaaattaaaggatagcactcaagtctgtagagaaaattccagtgcctcrgttctgtaggatctcacctgtcctctgggacccaccctaaaaagtgtttcttacttgaaagtttgagtaacatgcatccgacgtataaagaggacttaga

SEQ ID NO: 18760 - DNA, 201 bp, Homo sapiens
ccattaccagctgggggtgttgagcagctcgctttacctccctccaatctgttcccttttccatggccactaggacacttagcaagggcaggagcaccagmgtgaaagaggagcaggctcaggggcccagccctgggctgtgggctggggatgcagacaaccagagctgagtcagatgggagaggaaccactccaggttca

SEQ ID NO: 18761 - DNA, 201 bp, Homo sapiens
gataattaatgttttacaaatgtgcgttgtatttctaaatatatgcacactgtgccttttgttttgtttttgttttcattttgtttgctttatttttgcgsaaccattttaaagtaagttattatgacgcttcactcctaagtatttcagcctgtattttctaagaagataggacattctctatcctaatcataaagccat

SEQ ID NO: 18762 - DNA, 201 bp, Homo sapiens
tgggcaggaagtggagtgtgtgcctgcttcccttccctgtcttgtcctggaaactcaaagggtgggcaggaagtggagtgtgtgcctgcttcccttccctrtcttgtcctggaaactcaaagggtaggcaggaagtggagtgtgtgcctgcttcccttccctgtcttgtcctggaaactcaaagggtgggcaggaagtgga

SEQ ID NO: 18763 - DNA, 201 bp, Homo sapiens
gagggctgtgatgagtgtgcttgaccattataaaactaccttcattactagagggacacagattccccccacctctaccatgattgtattgttgaaagcckccttttatcattttgctgccatatgtgtttgtgaaaatcagctgcgttgtaaaaattcttacttcctggaaaccagaaacccattcagctagtgtcccta

SEQ ID NO: 18764 - DNA, 201 bp, Homo sapiens
gtctttcatcttcattagaaccaggtacagtgttggtattcagtggtagaaaggtatctcccctcctaaagaaaattgatattccttgtaggttttttcaraatgatgataaaattgaaagcagtgttactaccagtaattaataatagatctactattttaataaattcctaatttatactaaatatgtatctctaatat

SEQ ID NO: 18765 - DNA, 201 bp, Homo sapiens
atctccactaaaaatacaaaaattagctgggcgtggtggcacatgcctgtaatcccagctactcaggaggctgaggcaggagaattgcttgaacccaggargcggaggttgcagtgagccaagatggtgccactgcactccagcctgggcaacagagtaagtgagactccatctgaaaaaaaaaaaaaaaaaaaaaaaaag

SEQ ID NO: 18766 - DNA, 201 bp, Homo sapiens
ctcccccagtcttccccaaacaatttattgtctgcacacacacacacacacacacacacacacacactctctctctctctctctctctctctctgtgtgtrtgtgtgtgtgtgtgtgtgtgtgtgtctctctctctgtgtctctctctctctctctaagccactccactccccttccactgttcctggtccctgtgaatgg

SEQ ID NO: 18767 - DNA, 201 bp, Homo sapiens
gtcttactctctcacccaggctggagtgcagtggtgcgatctcagctcactgcaaccttcgcctcctgggttcaagcaattcttctgcctcagcctcccargtagctgagattacagatatgcgccaccacacccagctaattttttgtatttttagtagagaaggggtttcactatgttggtcaggctggtctcaaactc

SEQ ID NO: 18768 - DNA, 201 bp, Homo sapiens
atcccagcgactcgggaggctgaggcaggagagttgaacctggcaggcagaggttgtggtgagctgagattgcgccattgcactccagcctgggcaacaakagtgaaactctgtctcaaaaaaaaaaaaaaaaaaaagtctggtaatcttgcctattcttcctcatggtgtgaatctggaggcattctccattccccaaac

SEQ ID NO: 18769 - DNA, 201 bp, Homo sapiens
aagacgctttccttcactccttgttgggtggtttttttggtgtgtgtgtgtgtgtgtgcgcgtgtgtgtgtgtgtgtgcgtgtgtgtgtgtgtgtgtgtgtttattccttccctttcccaaaagataatggagaaggaaaaaagtaagatgagttccacccagctgaaaatgaaactactggaagaacgattgttgccatt

SEQ ID NO: 18770 - DNA, 201 bp, Homo sapiens
gaagacgctttccttcactccttgttgggtggtttttttggtgtgtgtgtgtgtgtgtgcgcgtgtgtgtgtgtgtgtgcgtgtgtgtgtgtgtgtgtgtgtttattccttccctttcccaaaagataatggagaaggaaaaaagtaagatgagttccacccagctgaaaatgaaactactggaagaacgattgttgccat

SEQ ID NO: 18771 - DNA, 201 bp, Homo sapiens
gttgggggaagacgctttccttcactccttgttgggtggtttttttggtgtgtgtgtgtgtgtgtgcgcgtgtgtgtgtgtgtgtgcgtgtgtgtgtgtgygtgtgtgtttattccttccctttcccaaaagataatggagaaggaaaaaagtaagatgagttccacccagctgaaaatgaaactactggaagaacgattg

SEQ ID NO: 18772 - DNA, 201 bp, Homo sapiens
ctcctccctggctccattctgcctctaactctactcccttagcagccacgaggagctctacctgtggtttctagcaccacctttgttctgggagctccagktttctgtttctagctcattcctgtttcacaagcttcagctactagaatgtcttagtcagacttcccaaaccagctgtaccccagttccaccaaggtgtca

SEQ ID NO: 18773 - DNA, 201 bp, Homo sapiens
ggatgctgtaggctctgggaggagagatgctgaccctagccttgagaataatgcttctcagaggaagagaatgcccacactgaaacctagtagataaatakaagaattagataaaccagggagcagagagcagcatctgcaaagacttaggtgtaggcaaagggggctttccaggagatatgagtagttcagcctccgata

SEQ ID NO: 18774 - DNA, 201 bp, Homo sapiens
tgttgggggaagacgctttccttcactccttgttgggtggtttttttggtgtgtgtgtgtgtgtgtgcgcgtgtgtgtgtgtgtgtgcgtgtgtgtgtgtgtgtgtgtgtttattccttccctttcccaaaagataatggagaaggaaaaaagtaagatgagttccacccagctgaaaatgaaactactggaagaacgatt

SEQ ID NO: 18775 - DNA, 201 bp, Homo sapiens
ggccatttttcacttagatagcagggctgtacaaaacaccctgtggtacaggataatgtgttggtgtccccgtgttttaaagtttggatataacacctttkcatgctcattttatttcaatttttaaaatgcataaaaataaattaaaaatggaaacttgagtaaaaatgtgggaagctctaaagaacctccatgaagtcc

SEQ ID NO: 18776 - DNA, 201 bp, Homo sapiens
ctgttgggggaagacgctttccttcactccttgttgggtggtttttttggtgtgtgtgtgtgtgtgtgcgcgtgtgtgtgtgtgtgtgcgtgtgtgtgtgtgtgtgtgtgtttattccttccctttcccaaaagataatggagaaggaaaaaagtaagatgagttccacccagctgaaaatgaaactactggaagaacgat

SEQ ID NO: 18777 - DNA, 201 bp, Homo sapiens
gtgtaagcttcctcctgactaggtgatattgctgttgggggaagacgctttccttcactccttgttgggtggtttttttggtgtgtgtgtgtgtgtgtgcrcgtgtgtgtgtgtgtgtgcgtgtgtgtgtgtgtgtgtgtgtttattccttccctttcccaaaagataatggagaaggaaaaaagtaagatgagttccacc

SEQ ID NO: 18778 - DNA, 201 bp, Homo sapiens
ccgtggggcagggatcggggtaggagggatcctgcatgagaggctgtgggtcagacaccagtcagcagggggcgcggtggagcacccattgatttctaggycctcttgggctagcatcgtttcttcccgagtgggagctcaggcccagaatgtggatttgaccagtcttcccaaggtcacccagttgaaaagtggccaggc

SEQ ID NO: 18779 - DNA, 201 bp, Homo sapiens
ctgtgtggtggtttccatggggtgcgcacagctgcgaggccccaagttatcttccttttggtctgccaggtataggtaaattgcccatccaactgggtgcwtagaaagagccaatggtggccgggcgcggtggctcacgcctgttatcccagcactttgggaggccgaggcgggcggatcacgaggtcaggagatcaagac

SEQ ID NO: 18780 - DNA, 201 bp, Homo sapiens
tatctcttatttcgttgtttctgacccagaaaactgaagaggcaagatcccgtagtggttgaaagttggcaaatccacattcagttcctagctctaccttkagctgctgtgtgaccctgggcaagtgactccccctctctgagccttggctactttgtctgcaaaatggggttgcagtaaagaattcatgagaaattgtat

SEQ ID NO: 18781 - DNA, 201 bp, Homo sapiens
gccactgctgcacatgctcagtgaggcttggcggccatcctggcacatggctcttcctgggtcaaccgtgacctgtctggctcaggaatgggctctggctkctgggggagccgtgtcactcctgggccatgggggcacctcctgggcacttaggtgtttcagcatagattccagtttcgcaccctgggcagacccccaggc

SEQ ID NO: 18782 - DNA, 201 bp, Homo sapiens
agtagaacagaatagagaatcaactgatatctagatatattttttagaaaggtgccaaggtaattcaaagggtagtctgttaaaaaatgaaagggtagggmaggcatagtggctcacacctgtaatcccagcactttgggaggctgaggtgggtggatcacctgaggttgggagtttgagaccagcctggccaacatggcg

SEQ ID NO: 18783 - DNA, 201 bp, Homo sapiens
atatgtgaagcactgttctcagtgattggcagatagtaatgtgaattcagtggtcatggtggtggctgttttttgtttttgttttttttttttttttttttgagatggagtttcgttcttgttgcccaggctagagtgcagtggcgagatcttggctcaccacaacctctacctcccgggttcaagtgattcttctgcctc

SEQ ID NO: 18784 - DNA, 201 bp, Homo sapiens
tatatgtgaagcactgttctcagtgattggcagatagtaatgtgaattcagtggtcatggtggtggctgttttttgtttttgttttttttttttttttttttgagatggagtttcgttcttgttgcccaggctagagtgcagtggcgagatcttggctcaccacaacctctacctcccgggttcaagtgattcttctgcct

SEQ ID NO: 18785 - DNA, 201 bp, Homo sapiens
atatatgtgaagcactgttctcagtgattggcagatagtaatgtgaattcagtggtcatggtggtggctgttttttgtttttgttttttttttttttttttttgagatggagtttcgttcttgttgcccaggctagagtgcagtggcgagatcttggctcaccacaacctctacctcccgggttcaagtgattcttctgcc

SEQ ID NO: 18786 - DNA, 201 bp, Homo sapiens
aatatatgtgaagcactgttctcagtgattggcagatagtaatgtgaattcagtggtcatggtggtggctgttttttgtttttgttttttttttttttttttttgagatggagtttcgttcttgttgcccaggctagagtgcagtggcgagatcttggctcaccacaacctctacctcccgggttcaagtgattcttctgc

SEQ ID NO: 18787 - DNA, 201 bp, Homo sapiens
taagtgagttaaatatatgtgaagcactgttctcagtgattggcagatagtaatgtgaattcagtggtcatggtggtggctgttttttgtttttgtttttkttttttttttttttgagatggagtttcgttcttgttgcccaggctagagtgcagtggcgagatcttggctcaccacaacctctacctcccgggttcaagt

SEQ ID NO: 18788 - DNA, 201 bp, Homo sapiens
attgtatcagttgctttatcatgtatttattcaactatttatcatccatagcatccattaatccatctttttttttttttttttttttttttgagacagastcttactctgtcacccaggctggagttcagtggcactatctcggctcactgcaacctccacctcccaggtacaagtaattctcttgcttcagtcacccaa

SEQ ID NO: 18789 - DNA, 201 bp, Homo sapiens
ggggatatacttgaatacttgataagaaaagtactggaatatgtggtataccttttcataactattgtagattcacagaaaggaaatttttccaagtgtcrtctatagaacaggttacaaatgtcaggtgatcaaatgtaatgaatgaagttaggctgtagtattgtgattagataacagtcttgataagttgggattatc

SEQ ID NO: 18790 - DNA, 201 bp, Homo sapiens
cctcctgccccagggctgaaaccttctctcatccaaaagtcattgggaaggttgggaagcaagataggcttctattgtgtgtgtgtgtgtgtgtgtgtgtrtgtgtgtgtgtgtgtgtgtgtgtgagagagagacagagacagagacagagagattgtgatggctaagcatggggtgtgggagaccaaggtgtgagtaact

SEQ ID NO: 18791 - DNA, 201 bp, Homo sapiens
agtaagttgtaggctgggaggctaggccagtctctctctccttttcatgtttttctgcctgctttatattcactggcagcttattagatggtgcccaccasattaagggtggatctgccttccccagcccactgattcaaatgttaatctcttttggcaataccctcacagacacacccaggatcaatactttgtatcctt

SEQ ID NO: 18792 - DNA, 201 bp, Homo sapiens
atgtaaatgtcaggtccatgttaaaaactcagtaattgttaggtttttttcttttttttcaccttctgtatcaaaagactaagaacattactgtatattasaaatgtcagagaaaggtatgtttaaggtaatggagaagaaaattttaatgaccaaggaattaggctgttaacatgcagagtagggcttaacattgtctca

SEQ ID NO: 18793 - DNA, 201 bp, Homo sapiens
ttcaggagcgaagagctgcttctgtatcttaaggtaagggagaaggcttgggctgttggcttgttctctgaagcaatgtcagcttctgcattgctcttccrtaattaaatcttccagctgttcatttcattttcctatctgtttcccacaagtcactgcatttggggagaaggacttcacagtgttgttcttgcactgtaa

SEQ ID NO: 18794 - DNA, 201 bp, Homo sapiens
tggagccgaggggcttttggaggcaagctttcctttatcttatcaagcactacagtgagaaccacaaggtaaggattttatatcctaatctcaggatttaycattgtacgtgatcatactactattgtactgtttagagcaggtcagactgagaaatcatgctggactggttttgtgtctgatctgtggttttagtagctg

SEQ ID NO: 18795 - DNA, 201 bp, Homo sapiens
tctaactaaaaaatacaaaaattagctgggtgtgatggcacatgcctgtaatcccagctacttgggaggctgaggcaggagaattgcttgaatccgagacrtggaggttgcagtgagccaagatcgtgccactgtactccagcttgagtgacaagagcgaaactccatctcaaaaacaaaacaacacaaaacccacaaaaa

SEQ ID NO: 18796 - DNA, 201 bp, Homo sapiens
agagcacccagcctgccccatatcacttcaccaaatatttctaaaatgattcagtttttctcttgtttacttgaagtcacagttttcttgcaagattctayttccccttcttgccttttcccccctgcctcctgactttcagtggctggatttaactagtggtattttgctttcaggaaaaaaaaaatttgtaatccttgg

SEQ ID NO: 18797 - DNA, 201 bp, Homo sapiens
agcccctctgtacccatacattcctcatatccctggggtcctgtgtctctctcctcgactggtctgtgaggcacaatgggtatcagaaagcatcagcacaygttgagataggcagggcctgcagcctcccgaatgtggcacctctccaggattctctccctgaccactggtttgcctgcatggtcaagaggacgtacccag

SEQ ID NO: 18798 - DNA, 201 bp, Homo sapiens
gagggttgtattcagagaaatagcagctgggaatatgtatgctgggccactgtggaaggggatggaagtagttgaggcagagagaccactgatgatcccayggacattgctcaggccagggctggtgggagcctaatctaggacactgcttctgggggtaaagatgagaaaatcatcctagagacatttaggagacccaaa

SEQ ID NO: 18799 - DNA, 201 bp, Homo sapiens
accgtgttagccaggatggtctcgatctcctgacctcatgatctgcccgccttggcctcccaaagtgctggaattacaggcatgagccaccacgcccggcytgtccagtgggaatttcaagtgaactctgaagtccttttaacaggatcccagtagtttcttttcttttatttatttatttatttattttttttgagacag

SEQ ID NO: 18800 - DNA, 201 bp, Homo sapiens
ttcaccgtgttagccaggatggtctcgatctcctgacctcatgatctgcccgccttggcctcccaaagtgctggaattacaggcatgagccaccacgcccrgcctgtccagtgggaatttcaagtgaactctgaagtccttttaacaggatcccagtagtttcttttcttttatttatttatttatttattttttttgaga

SEQ ID NO: 18801 - DNA, 201 bp, Homo sapiens
aaaagttaaccaaaaaatttaatttttaattttttttttttagttgaagttgtactttgtcacccaagctggagtgcagtggtgtgatctcggctcactgyaacctctgcctcctgggttcaagcgattctcctgcctcaacctccccagtagctgggattacaggtgtgcgccaccatgcccagctaatttttgtgtttt

SEQ ID NO: 18802 - DNA, 201 bp, Homo sapiens
ctgggaggcaaaggttgcagtaagctgagatcacgccactgcactccagcctgggtgacagagcgagactctgtctccaataaaaaaaaaaaaaaaaaaamaaagaaagaaagaatgaaagggtagtctattaaaaaatgtcgatggagcagttgggtatccgcagggaaaaaaaaggaactgagttttggatgaaatcac

SEQ ID NO: 18803 - DNA, 201 bp, Homo sapiens
tgcccattagcctttcctcatagttattttatgaaagtgcacaattaatgtgagagtgtcgtgaaacctttggagacagtgccctggacatactgaggtarattttgttcaaaatcaacagatagcaccctactgtaatctgctaacagcttgtttatctaattgtcaataaaatttctggttcaggaaagaatttatgtt

SEQ ID NO: 18804 - DNA, 201 bp, Homo sapiens
attttggccaggctgatctcaaacacctgacctcaagtgatctgcctgcctccacctcccaaagtgctgggattacaggtgtgagccaccattccaggccscagatgtcatatcattcttaaatacttccatatgtgcctctaaaaggtagatttttctttttaaaaaacataacattttcacacctaaaaagttaaccaa

SEQ ID NO: 18805 - DNA, 201 bp, Homo sapiens
tgttatgatggttaatcttgtgtgtcagcttgtctaggctatggtacctaattatttggtcaaacactagtatagatggtactgtgaaggtattttaaatstaactaacatttataatcattgacttttagtaaaggagatcaccctccataatgttggtggtcctcatccaatcagtttaaagccttcagagcagaaact

SEQ ID NO: 18806 - DNA, 201 bp, Homo sapiens
tttactacataaagttcttaaaacattaaaaatggtaaaggtcctcaaaaaattaatgtagaattattatatgatccagtaatttgacttgtggatatatrtgcaaaagaagtgaaagcagggacctgaatagacatttgcacatgcatgttcatagcagcattattcacaatagccaaaaggtggaaataacccatatgt

SEQ ID NO: 18807 - DNA, 201 bp, Homo sapiens
tgaagcaaatcccagatgttgtcatatcatccttttttttttttttttttttctgagacagagtctcactctgtcacccaggctggagtgcagtgatgcartctcggcacgctgcaacctccacctcccaggttcaagtgattctcgtgcctcagccaccccagtagctgggattacaggtgtgcaccaccatgcctggct

SEQ ID NO: 18808 - DNA, 201 bp, Homo sapiens
ctacttccttggcttttctttctgtctcctttgccagttattccatacctccccaaagtgttaaatggtgctcccttccagggctcagtccttgggcttcttttttttttttttcctttttgagatggagttaacgctcttgttccccaggctggagtgcaatggcgggatcttggctcactgcaacctccgcctcccagg

SEQ ID NO: 18809 - DNA, 201 bp, Homo sapiens
aaattcagtgtacttttgatggaagacatagttctttgtcttttgaatttttaaaaagtgttggtatgattgactgttaattcatgtaagaatatacaatkggtcacatttatgagtgatgcctaagtgcatcttttgaaagatttggatagtgggaagatgagaaaggtgaatagagcatgtcaagttttgtgggaaagt

SEQ ID NO: 18810 - DNA, 201 bp, Homo sapiens
tattggaaatctattcagttttataaaagatttatacaaataatttatatttatctctgtttaactggtactacttttcagtctttttaaagtgttttttktgtgtgtgtgtgacagagccttgctcttgtcgcccaggctggagtgcagtggcacgatcttggttcactgcaattactacctcctggattcaagcttcct

SEQ ID NO: 18811 - DNA, 201 bp, Homo sapiens
tctgcctcctgggttcaagcaattctccttcttcagcctccctggtagctgggattacaggcatgcaccaccacacccggctaatttttgtatttttagtrgagatggggtttcaccatgttggccaggccggtctcgaactcctgaccttaagtgatccacccaactcagcctctcaaagtgctgggattacaggtgtga

SEQ ID NO: 18812 - DNA, 201 bp, Homo sapiens
ggagacggaggttgcagtgagtcaagatcacgccactgcattccagcctgggtgacagagtgagaccctgtctcaaaaagaaaaaagaaaaaaaaaaaaaaggatggctttgagagattttaagtagaaatgacaagacttggtgacaaattacacgtaagaggcaaaagaagaatcaaagatgacttgccaaggttagca

SEQ ID NO: 18813 - DNA, 201 bp, Homo sapiens
gcaatggcacgatctcggctcactgtaacctctgcctcctgggttcaagcagttctcctgcctcagcctcctgagtagctgggattacaggcatgtgccamcacgcctggctaattttgtatttttagtagagacagggtttctccatgttggtcagactagtctctcactcctgacctcaggttgtctgcccgccttggc

SEQ ID NO: 18814 - DNA, 201 bp, Homo sapiens
gtgtgtgccaacatactctgctaatttttgtgtttttagtagagatggggtttcatcatgttgaccaggctggtctccatctcctgacctcaggtgatccwcacaccttggcctcctgaagtgctaagatttcaggtgtaagccgcagtgcctggccagatgtgtgcttttctaagagtcactgttgattcttgggttttt

SEQ ID NO: 18815 - DNA, 201 bp, Homo sapiens
ccctccctcttggcaccctgcatatcgtattataattgtcttttctgtttttcttgagggcaggaaccttcttgcttgaattctcccttgaagaataatcstattcagtaggtagctagctaaatgaagagatatttaaaaatatctcattcagtggaatttgttatgtccaaataagcaaggcaatgttagtatcagttg

SEQ ID NO: 18816 - DNA, 201 bp, Homo sapiens
taaaagcgttcctacttctacacatcctctcctgcatctgttgtttcctgactttttaatgattgccattctaactggggtgagatggtatctcattgtcsttttgatttgcatttctctgatggccagtgatgttgagctttttttcatatgtttgttggctgtataaatgtcttcttttgaaaagtgtctgttcatatc

SEQ ID NO: 18817 - DNA, 201 bp, Homo sapiens
ggtcagggtcagagagtacatctatatgtatttctgcatctatctgtgtatattgaaaagtgtgagtccacaccagtacttccgatttcaaccaataccaycgattcattcaagttttctccctttccatatttgtaacttctctcttcaactgtgagaagcctggttcccattatccttaatatatttacttattaatcc

SEQ ID NO: 18818 - DNA, 201 bp, Homo sapiens
tctctcctccactcttcacagcagtcccgcagaggaagaattatcctcgtcttacagaagaggaaaaggaaccttagagaatcattattagctgatattgwcagtatttgaacctagctctgtttgactctgaagtccatgttcctcccattcttttgtcttgcccccatcccaaacttggtgccttatttgacttaggct

SEQ ID NO: 18819 - DNA, 201 bp, Homo sapiens
ttggtttgttaggttgtgcttaccatgaaaggaaaagtgacaaaagtatttgggaaagattttatacacagaccaaaatgaaaaatattttcatcatggcygtccaggaagtagaaaatcagctaagtgctaagtggaacattcatttcctctttctagtattttggttaacggaaatacatccccccaaaatgcccccaa

SEQ ID NO: 18820 - DNA, 201 bp, Homo sapiens
actttcctatcctttcattcttgagtctgcaggcatcagcctacatgccatcaggcaggctttgctcatgagctcagggtggctgctatttcacctgtggrccttacaccctcaccacaatttccaaaggcagcaaaaatttttgttgttgttgagatggagtctcgctgttgttggccaggctgtagtgcaatgacacga

SEQ ID NO: 18821 - DNA, 201 bp, Homo sapiens
aggcagaaacttgctgtaatacacacccatcatatgtctagaaccaagtgccctgaacattcacgtgcattctctcctccactcttcacagcagtcccgcrgaggaagaattatcctcgtcttacagaagaggaaaaggaaccttagagaatcattattagctgatattgtcagtatttgaacctagctctgtttgactct

SEQ ID NO: 18822 - DNA, 201 bp, Homo sapiens
ctgggactacaggtgtacaccatcatgcccggctaatttttgtatttttggaagagacagggtttcaccatgttggccaggctggtcttgaactcctgacytcaagtgatccacccatcttggcctcccaaagtgctgggattataggtgtgagccaccacgcccagccaagcttcagtatttttttctaaaaggtgactg

SEQ ID NO: 18823 - DNA, 201 bp, Homo sapiens
gtgattgaggcctgatggtaagattaacatgactaaaatgtgggggcatgtgggttggtagggggtggtgggcagatgaagctgataagtctggtctcacygaggctaaattgcaaatagtcttgcatcgcatgtcctgctaatgacggtcttttaactcctgaatgcatttgggagcctttgaggtttacattgtgtttt

SEQ ID NO: 18824 - DNA, 201 bp, Homo sapiens
cctcccgagtagctgggactacaggtgtacaccatcatgcccggctaatttttgtatttttggaagagacagggtttcaccatgttggccaggctggtctygaactcctgacttcaagtgatccacccatcttggcctcccaaagtgctgggattataggtgtgagccaccacgcccagccaagcttcagtatttttttct

SEQ ID NO: 18825 - DNA, 201 bp, Homo sapiens
attttaaagtacagacttaaaaacaaattttgtggagttacatcaaaatgatcatctcctgtcaccattatttttgaaaagaaattacattttcatatctraaaggcaggaggaatatgatgtccaattaaggatagtttttataattgaattaaatatctttatatggaaagtacactgtattgtccccgtttttctcat

SEQ ID NO: 18826 - DNA, 201 bp, Homo sapiens
cccccaaacccttcagtcctaggcaatcactaatctacttgctatagatttgccttttatgggcatttcatatattaataaatagaatcatatataacccktcctgcgtggcttctttcacttaatgatttcaagatttatccatgttggagcatgcatgagtgtttcattactttttactgctgaataatattccattgt

SEQ ID NO: 18827 - DNA, 201 bp, Homo sapiens
attcagaacccttttaagttaacctctttgacttcccttgccagacctttagtttattggaaattgtccaaggaaacaatcttttagagcctactggtttkgggcttttgtcgacttctacttcaccctaccaggaattaaaaaagggaatcaattgagaataagtacctcctggtaagctgtggcaccccaaaaagaatc

SEQ ID NO: 18828 - DNA, 201 bp, Homo sapiens
gagcttgctttatctagcagcttaatgtgatgccactttcccctttatctcctgtgcattagcaggactcctgtccttttggttccttgatcataactagytctttccagtccccagaatctctgcctagttcttttctctgcctgaaacaacccagtgccctgtttcttgagtggctgctccatttcatcctttggtcaa

SEQ ID NO: 18829 - DNA, 201 bp, Homo sapiens
ttgttactatgaaaagaagccacattataccaacattgtatgacacaaatgtataatatttacaggaagtataaaacaaatgataaattttgattttttttgcatcattattaggcagagaaacataagaagcagtgtggtgtataaaatgtgactttgattccacaaaggttctgccagtctttcgacagtggcttgttt

SEQ ID NO: 18830 - DNA, 201 bp, Homo sapiens
ctttattttttcattatgcaaagggtttacataggtacaagcaaatctcagttaaaagttagttccccgcccccatttaacaagatttcatatgcattttkacataactgcagaatattccatcaagtataactaccataatttccataaccaccctcccttgttggacatttaggttatttccagtcttttgatattata

SEQ ID NO: 18831 - DNA, 201 bp, Homo sapiens
taggatgtatgtatgtagaagaagaggacctgtggacctttttttttttttttttccgcttgagacagggtcctactctgttgcccggagtggagtggcaraaccatggctcactgcagccttgaactcctgggctcaagcagtcctcttaagtagctgtgcacactgccacatctgcctaatttttaaatttttggtgga

SEQ ID NO: 18832 - DNA, 201 bp, Homo sapiens
ccaccgcagagcctgaagcccacatcctgtgctggggccactgcctatgtgagtgtccagccagtggtcgtggaagggcttctcgggcatgctggggcacrggtatggatgtgtgaaattggcattcatgatttttgttgaaagaaggaaggagtgaacctacagactgagaagtaatcaaataaatgcccgaataaaggc

SEQ ID NO: 18833 - DNA, 201 bp, Homo sapiens
tttattttttattttttttttgagatgcagtttcacttttgttgcccaggttgaagtgcaattgcgtggtctcagctcactgcaacctctgccttccaggktcaagtgattctcctgcctcagcctcccaagtagctgagcttacaggcacccacgaccatgctcagctaagttttgtagttttagtagagacagggtttc

SEQ ID NO: 18834 - DNA, 201 bp, Homo sapiens
aggcccaagaattacctgcccagagcattagaatttgatgtaaatgattatttacatttggattgaacagtgcagtctttttctttttaaagaaaaatttstctttcagttttgtctgttatatttcagccctggccaggccactgcatatttatacagttgacccttgaacaatatgggtttaagggtactggtaccctc

SEQ ID NO: 18835 - DNA, 201 bp, Homo sapiens
tgaaatatttgaagctataaaccagactgtgtttttctcttgatcaaaatcattcagtggcattctattgcctccccccaccgccaaaaaaaaaaaaaaaatctgaattctttaccatgacctgtgggactctctgtgtgatctggagcttgctttatctagcagcttaatgtgatgccactttcccctttatctcctgtg

SEQ ID NO: 18836 - DNA, 201 bp, Homo sapiens
ttatctttagatagtaattaaacccctatgtagactggcccaaaggggtatagggctttcctttgcccagtgtgaagggagcccatgcttccttgctcatygattcattcggcagtggcaggatgctcgctctgtgctgggtgccaagcgtacagagaggagaggaccagatcctgcttgccaggtgcgcatagacaggta

SEQ ID NO: 18837 - DNA, 201 bp, Homo sapiens
aagtgaatccaaagtagactgaaatgaatcttgagttcatttctgaatttcatttgcaagtgtatccagcgttaggtgtgttaatttcatattttggttcrtactctgaggcttggtgtctcttgtgggcagagctttgtagatgttacttttctattacactatgcaatctgctgcttcatgtatgcataactgaaagat

SEQ ID NO: 18838 - DNA, 201 bp, Homo sapiens
tgcactgtgcctggccctgtgttgggcagtcatccctaagttctaaatgtgcacacttgagtaaaggaagtcggctgtagatgcaaacacttccaacaccrcgtggtccgtgctgccctgatggggactgtggagccccacagaagacatcaaactcagcctggaacagggatgcctgggttcatgttaaaagttgtcact

SEQ ID NO: 18839 - DNA, 201 bp, Homo sapiens
tgccactggataaataaagcctattatttccttttcaacattttaggctattattctcatacaagagctaataagcagaaggttaggtatattaccaaacyatgatcctgtctatcagaagaaaccaggaaccttgattaatatgccttgttaactgatgatttcagttccatattggtagtgctagaataatttgtataa

SEQ ID NO: 18840 - DNA, 201 bp, Homo sapiens
gggcgcctgtaatcccagctactcaggaggctgagcaggaaaatcggttgaaccctgggttgcagtgagccgagatctcgccactgcactccagcctgggygacagagcgagactccgtctcaaaaaaaagtctcatgcaagtggaatgtgaaaggatctaatccatgatctggcccctgccaccctgtctagtctcctct

SEQ ID NO: 18841 - DNA, 201 bp, Homo sapiens
agcaatggagggggcggtccaagcaatggtcgcctggtgcttcagcgtgcatgccttcccctccgccctggcagcctccactcgtagtccctgagtgacarttcatcacccgcagctgggcttctcgggctattcttcggtaccactaggggcaaagtgtctaaatttgacccccagaaatcagatccctgatccaagcca

SEQ ID NO: 18842 - DNA, 201 bp, Homo sapiens
ctgccaacctccacctcctaggttcaagcaattcttatgtctcagcctcccgagtagctggaattacaagtgtgtgccaacatactctgctaatttttgtrtttttagtagagatggggtttcatcatgttgaccaggctggtctccatctcctgacctcaggtgatcctcacaccttggcctcctgaagtgctaagattt

SEQ ID NO: 18843 - DNA, 201 bp, Homo sapiens
ggaccagaggtagacttataagagtgcacacaactcagcctcacttagcagagatttatttatctcttccaacttgacacatacgatttccttttttttttcgcctcctataacccaagaaatgattaatgaaggatctactttgttttgtagacattatcttcaaattcccagaaatatgtttgagagttgtatctactg

SEQ ID NO: 18844 - DNA, 201 bp, Homo sapiens
ggcagaaacttgctgtaatacacacccatcatatgtctagaaccaagtgccctgaacattcacgtgcattctctcctccactcttcacagcagtcccgcaraggaagaattatcctcgtcttacagaagaggaaaaggaaccttagagaatcattattagctgatattgtcagtatttgaacctagctctgtttgactctg

SEQ ID NO: 18845 - DNA, 201 bp, Homo sapiens
taaactcagaaggttcaaatcccatctcctcttttcccagcaacatctccatgagcatctccaacttttctggcttctccttctccatctacgtaatgagrgcaatcataagtccttggaggattgtagcgaggatcaaatcataacgtatgatgctgcctggtagtagtaactggttcctacacaagttttacctagtga

SEQ ID NO: 18846 - DNA, 201 bp, Homo sapiens
attctttgatttctttctttggtgttttgtggtttttggcatacagttcctacacctgtattgttagatttatacctaaatatttattcccttttttttttctttcccttattggtgctaatatgaatggtacagctaataattaaatactaagtttttattactttcattcttggctttctgaaggtgttttcctatcat

SEQ ID NO: 18847 - DNA, 201 bp, Homo sapiens
tcctctgaataggtgacttctgttggtttcagggtatcacataatcttaaagtagttctccttttggggtgaatgtaacatcctgtatttccataacttaycttgctaaaatatgaataaaaacttaataatgactctgcctctacataaaaaaataaaaatgttacctgggcttggtggcagacatctgtagtctcagct

SEQ ID NO: 18848 - DNA, 201 bp, Homo sapiens
tagtcctggtacttgcctgtccatactctctctctctctctctctctctctctctctctctctctctctcactttcccttcctcagcatctttctttaccytagaacatttatttcttccgcagaaagtaggtgatgccatcatgtttaattacctaacattctaaagcacagcttgtagattgagacctagattcaaatt

SEQ ID NO: 18849 - DNA, 201 bp, Homo sapiens
tctcagcatcattacatgtaccaaattagcagtgagtgttaataggacagaaataggattttcagttcctttagccaaaaagttaaaaatattaaacatcytgaagagtaatggagggataagcaatctcaaggtggtcgcagagagcctctggaaattgttatagtcttaattgtttacaggcttaatgaaaataccaac

SEQ ID NO: 18850 - DNA, 201 bp, Homo sapiens
cccaaattccagatggctttctttttggtaaacttcacaagctgattctaaaatgtatatgaatatgcaaaagatctagaatagccaaaacaatgttgaargagaagaacaaagttgtaggacttatattacctgtttgcaagactcactataaagttacagtaatcaagacagtgtagaaacacatataaatcaatagaa

SEQ ID NO: 18851 - DNA, 201 bp, Homo sapiens
caaaattaagagtccagaattagacctacacataagtggtcaattgatttttcaacaaatatgccaaagtaattcaaaagggaaagaagagggatcttttwttccaacaaacgtgctggaacaactggatatctatatggaaaaaaaagaagccttgacttttacctcatgcaaatattagctcaaaatagactatagacc

SEQ ID NO: 18852 - DNA, 201 bp, Homo sapiens
atgtaggatcctggattggatcttgggatagaaaaatggcatgaatggaaaactgatgaaatcacaataaagtctggagtttagttaatactaatgtgctrttgttagtttcttagttttgacaaatgtgtggtggtaatctaagatatgcaagcttgtccaacccaccccactttgttgttgtggctgttctgttttgtt

SEQ ID NO: 18853 - DNA, 201 bp, Homo sapiens
attaggagccaacttgaagggctcttgtgttcttttgactggtcctcatcattctctgggttctcctttgctttctggtgcaagatgttctgtgctcatcwtttagtttcttttccttagccatgaaatctgccattttcccaaggttccttttggtggagaatgctatttaaaagccaaaattttgattctatgtgtgtt

SEQ ID NO: 18854 - DNA, 201 bp, Homo sapiens
tttttgtatgtttagtagagacggggtttcaccatgttagccacaatggtcttgatctcctgaccttgtgatctgcccgcctcagcctcccaaagtgctgsgattacaggcatgagccaccatgcccagccgtggatgctttcttgtaagtgaaattggtggattataaggcatggaaatttaaaattcattctatttgtg

SEQ ID NO: 18855 - DNA, 201 bp, Homo sapiens
ggaagattgcttgagttcaggagttcgagaccagcctggacaacatagtgagatccctgtctctacagaaaaccaaaaaattagctgagaccacaggtgcmtgtggtggtgtgcgcctgtggtcccagctactggagaggctgaggtgggaggatcccttgagtctggaggtcaaggctgcagtgagccatgatcatgcca

SEQ ID NO: 18856 - DNA, 201 bp, Homo sapiens
atggtggctcacacctgtaagcctagcactctaggatccgaggctggctgatcacctgaggccaggagtttgagaccagcgtggacaacatggtgaaaccstgtctctactaaaaatacaaaacttagccagtcatggtggcatgcacctgtagtcctagctacttgcgaggccgaggcaggagaattgcttgaacccagg

SEQ ID NO: 18857 - DNA, 201 bp, Homo sapiens
aacctctgagcctcagtttcttcatctgttcttcacctgtaaaatagggatagtacatcaaacataagggctccagaaatatcagcagtcccctttcagcrtgctttgtacttacatttaatgggaacaagtcttttgttcccccagcccccctctttttttcaattcttttaaagctgttgattctgcaggacattgtgt

SEQ ID NO: 18858 - DNA, 201 bp, Homo sapiens
gaccctgctctagttaccagcaataatattggtgtggagggggcaggtaaacaaacctgccagctgacttgggccctagacttggttaaaccctggcttgscttcccttgattgtagatggtagaagcccaacttaaacgaacttgagcaaagaggataggagggagaatttcttggcttatataactgagacatcccgga

SEQ ID NO: 18859 - DNA, 201 bp, Homo sapiens
actcttgtcacccaggctggagtgcagtgggatgatctcggctcgctgcaacctctgcctcccgggttcaagtgattctcctgtctcagcctcccgagtakctgggattacaggcgtctgccaccacacccaactaattgttttgtatttttagtagagatggggtttcaccatgttggccaggctggtctcaaaccctga

SEQ ID NO: 18860 - DNA, 201 bp, Homo sapiens
aagggatgcttaaaggggacttaaaaaaattttttttgagtggtggatgtatttactccaggaatataaattgatccagaattcttgaaaaaaaaaaaaaatagacaaaaacacttgaaacatggggtcgatgttccatttctaactattataacaatttaattcaaaagaaattattttcaccttaaagtaaattaatca

SEQ ID NO: 18861 - DNA, 201 bp, Homo sapiens
agtgttgaatagaagtggcagaaatgaatattcttttcttcatccgcatcttaaagagaaacatttagtcttttggcataattatgatattaattatatcrtttttttagatgccctttatcagcttgatgaagttctgttttgtttctagtttgtttaattttttttattatgaaaggatattggattttgtcagatgct

SEQ ID NO: 18862 - DNA, 201 bp, Homo sapiens
ttatcaatttctgcaaaaagcccagctgggattttggtagggatttaattgaatctgtagattcatttggggaggattgtcagcttaacaatattgtgttscaatccatgaatataggatatctttccatttattaaggtaatgtttagggtttttttccccataatgttttgtagttttcagagtataagttttgcaatt

SEQ ID NO: 18863 - DNA, 201 bp, Homo sapiens
tttttaaagcagtatctttgaagtgcaataaaacaaactatgcccatacaaatcaacagtttctgagaaatttttgcatgtttatttaactttaattggcrtctttaccctcctcctggacaatacaagattgtatattgttttgactttaatcattcccctccttgtttatatggtttttattgttgtgtattttacttt

SEQ ID NO: 18864 - DNA, 201 bp, Homo sapiens
gatggtttcaccaaggtgcttgcaccagcactgggctctaaggacaaggaagatgatgccagcacactcatgctcaaggcttgctggctggacacatgccrtttagttggtgccaactttccaagaggctcctgttggccatggctacaggttagaagatcaaaggggtgctttagggagtgggactcatgggggatgcag

SEQ ID NO: 18865 - DNA, 201 bp, Homo sapiens
gacagagtcacctcagtcacccatatttgtggaatgacaggtacagaaggccccatccaagacatgatgcccagctcacaaagggcatctcaaaagagccrcaaaggacgttgatctcccctgagcacctgctgtgtgctccaaagtacgggcagcttgacacacaccatatcaccttaaacctcacaataggaagtaggt

SEQ ID NO: 18866 - DNA, 201 bp, Homo sapiens
gctgattgcgtttcagatagattctgttgctctaggggcctatcaggtccctgacacgtgtcctctctccagtgcacttcctcaaaccgtgttctcctcaytagggaaacagaaatctctaatcagcttggcgcttcctttcttgggactttggatgcaagtgtcattgtgttgaaaccgggaatctggcccctggtgaga

SEQ ID NO: 18867 - DNA, 201 bp, Homo sapiens
acatttaaatgtcaattaaatttgaaatatctacatttgtcagcatttcattttgggccagcgtgacgtgctgctgatttgtccacgcgatgtgacacatraaaaaaactcccgagatgcagatcttcctcattaaaaaataagccggtgcgatcccggcgcggcagagagcatggagcacgtccctgcttcctgacgccg

SEQ ID NO: 18868 - DNA, 201 bp, Homo sapiens
ccctctctgagccttggctactttgtctgcaaaatggggttgcagtaaagaattcatgagaaattgtatggacagcatttcgcccaaggcttgtaagtatygccatccatgtggcctggactcgacaaagctctgatctgaccacatcagatgacaaacttctcacctggatgtaccctgccactttcaagagacaggtgg

SEQ ID NO: 18869 - DNA, 201 bp, Homo sapiens
agcaactcccagtcctggaggaaataaagaatattggtttcccccaagaacagtatactggagaagctgcccaagaagaaaatggcttcactttctcagtrgcttgctaggaaagtaatgagaataaggtttcaaaacttagttcctctaatttaatgtctttggaggaatcggctcctttgcagagaatagctttgatat

SEQ ID NO: 18870 - DNA, 201 bp, Homo sapiens
ccatccgggctgcagtccctgttctccacttcttggccacgtggtcacctcttcaccagtgatgccccagtgcacagctagcctgggtctgctcacaccargtaggctcaaagcgcctcttggttgggtgcacagatggacagatggatgggtggactcatgaagccctcaccctctagaaaatcagtattgcgacacctt

SEQ ID NO: 18871 - DNA, 201 bp, Homo sapiens
gaggtcaagcaggctgagaaccagcactgccagatcccagagaataaggctatttggtgatcgctccccctcatcccttccccaggcaaatgaatagcatmatgaagtgaaagaccccttgacttgaagttagacttgatgctaacctggactctgccttttctaagctgtgtgactctacacaagttactatacctttct

SEQ ID NO: 18872 - DNA, 201 bp, Homo sapiens
aagcggtagctgtttttaatcactgcacctgctttcctcttagagccgattcccatctgcatttcttatgggaagaaaatcttacgctagtatgcatgaakaccaccttcattgtgtctccttagcttccacaggcctcccagctcatctgccgttcctgcactaatcagaatttcctgacttctccctgtttgtctcggt

SEQ ID NO: 18873 - DNA, 201 bp, Homo sapiens
gaagtcccgctgagctgagtcttcaagacggcagagcagtcagtgctccaagcaaaggtgacagggagggggaatatccagggcccagtgtggtcaaagayggtaagcatggccgcaggggaggccaggagagggccacagaggtaggtagagccaacacacagcatggagactgccctgctcggagctcggcacggccgc

SEQ ID NO: 18874 - DNA, 201 bp, Homo sapiens
gataaggaccaagcaagcccctgagcctggtgttcagggccctctctatcccagcgtctgctgacttcccagtcccatgtcccagtcccccacgttgtcaygtggctccccacattggactggacacccatgcctctgggacccgccaaaaccaaaaggaaaagctgactgtcgacccaaaagtgtaaacggatctactgg

SEQ ID NO: 18875 - DNA, 201 bp, Homo sapiens
gaggagtcaacctatacttgccttattgataactgatcactggttatttataataaaatttaaaggctgggcgtggtggctcatgcctgtaatcccagcaytttgggaggctgagaccggcggatcatgaggtcagaagttcgagaccagcctggccaacatggtgaaacctcgtgtctactaaaaataataaaattagct

SEQ ID NO: 18876 - DNA, 201 bp, Homo sapiens
gagaccctcacagaaagatttgtttcctaaaacctgagtgctagctagagctcataatttttgtgtttttttgagacagagtctcactctgtcacccaggytggagtacagtggtgtgatctcggctcactgcaacctctgtctcccaggttcaagtgattctcatgcctcagcctcccatgtagctgggattacaggcgc

SEQ ID NO: 18877 - DNA, 201 bp, Homo sapiens
tctcccttgttatccaattcattgccattgacttagttctggccttccttattctttcttggattactgccacttaattggttttctttatttttgagacrgagttttgctcttgttgcccaggctggagtgcaatggcgcgatctcggctcaatgcaacctccgcctcccgggttcaagcgattttcctgcctcagcctc

SEQ ID NO: 18878 - DNA, 201 bp, Homo sapiens
ccagctaattttttgtatttttagtagagatggggtttcactgtgttagccaggatggtctcgatctcctgacctcgtgatccacccgcctcggcctcccraagtgctgggattacaggtgtgagccactgcccctggccagtttaatgtttctttagtctcccttaggaaaggttctcagtctttccttgactttgatga

SEQ ID NO: 18879 - DNA, 201 bp, Homo sapiens
gacggagtctcgctctgtcgcccaggctggagtgcagtggcaagatctctgctcactgcaagctccgcctcccgggttcacgccattctcctgcctcagcytcctgagtagctgggactacaggcgtccgccaccacgcccagctaattttttgtatttttagtagagatggggtttcactgtgttagccaggatggtctc

SEQ ID NO: 18880 - DNA, 201 bp, Homo sapiens
tagcagtagaaaatatttccttgttttttttttttttgtccttctcccctttccctcctcccctttatctggcaacgaatgtacctcgtgactccccagawgcctctaatatagacatctcaagtttggtttctgccatgaaatcgaggcagtttccaacaaagatccaattttcaaatgtgctgggttgccacctggcct

SEQ ID NO: 18881 - DNA, 201 bp, Homo sapiens
atgttctttaaagcaaaaggattctgttcagaatcacaaattgcgtttagtttatttaatgtttctttctttcttttcttttttttttttttttttgagayggagtctcgctctgtcgcccaggctggagtgcagtggcaagatctctgctcactgcaagctccgcctcccgggttcacgccattctcctgcctcagcttc

SEQ ID NO: 18882 - DNA, 201 bp, Homo sapiens
tctctccaaagggatgttaaattttggtttaagattttctcttgctttagctttttctctcccactcttcctctttccccagttgtaatgctttattctaytcagtgttcataggatttgaacaacctactgtacccactctccacctttaaaaatgactttccttaagattacaaatgctaacaaaactcttccgataat

SEQ ID NO: 18883 - DNA, 201 bp, Homo sapiens
gaggatcatcaggagtctgccctggggggacatcccctgatcctgtcctcctcattctgagccttctcattctgcacacatggtggaggggccctgggaccagtcctaaggcagttccaggcccagggccttgggaatgctgctttaggtttctttcttacctctaacagccccagcaagtccagtttaggctttaaaaaa

SEQ ID NO: 18884 - DNA, 201 bp, Homo sapiens
aagcacagggcatggcacagagtttctctcagtttgaactatcatgaagaaaaacatgaaatttgttttgatccttcaaactggaaattgaggatcatcargagtctgccctggggggacatcccctgatcctgtcctcctcattctgagccttctcattctgcacacatggtggaggggccctgggaccagtcctaaggc

SEQ ID NO: 18885 - DNA, 201 bp, Homo sapiens
ataagggatgtgactaatttgtctgtgcccccatcttgtgctgaaaataggtttgaggaaccttaagacactatgtacagtacagcaagatgagagataargaagcaaggaaaccgggagaaagaggaaactgcatgacgcctggaagggactgatgtgtgtgtgcagctgtgtgtctgtgtgaggctctgtgaccctcca

SEQ ID NO: 18886 - DNA, 201 bp, Homo sapiens
ggcctttgcaggtaaagcttgggaccaccattctatgtttgtttagaaacaaaggcattgactgggggcttttctgaagtatgatgaacagtggcactgargttttgttttgtggttggaagttatcaacatccctgagagtggtttatgtgtcttgcctaaaatccttccctccataaacccaaatattgacaaaagcta

SEQ ID NO: 18887 - DNA, 201 bp, Homo sapiens
aggtggttgccaggtgctgggaggagagggaaatggggagttattatttcaggcctacagaatttcagttttacaagatgaaaagagttctggagatagayggtgataatggttacacaatagtatgaatgcatgtaatatcactgaactaaccgtacacttaaaaataatcggcagtaaattttatgctatatgtatctt

SEQ ID NO: 18888 - DNA, 201 bp, Homo sapiens
aggaaagcattgcatggggagtgagcttggggatttcaggttctatattacaaagtcagtgtggcacaaaggaagaaatgcatacttgggaatcaaatccsaggtctaccactgactttgttttgtggtattaggtaagtgatttaactaacctctttaggcctagtcccttctctgtaaaatgggtattgtatctatggg

SEQ ID NO: 18889 - DNA, 201 bp, Homo sapiens
acagctctcactggcctcagcagtgtcactcccagcgttactgagactttcagggttaaagaagacaaggtgtccctttaacacaggagtgaccttcccasataggggaatggtgcttgttggctcagccacccaccctttggggagctgtctggaccacagcctaaccacctcctggctactgtatctgcctctgagcct

SEQ ID NO: 18890 - DNA, 201 bp, Homo sapiens
gttatgaaaagtagttgtgatttatagtgactgttgattatgcaacttctgcctgtagctaggaatggggatggacaggaaattacccacttaagtgctcytctagttgttggagaagacagagctttggttactactggctggctttccctcctggcagggcattcaagatgttctcctggctgtggtgaaatctaagtg

SEQ ID NO: 18891 - DNA, 201 bp, Homo sapiens
cagttagggaaggagtcaactccccgcaccctcccaagccggtgcccactcagggctctaagccagctcatgctctgcccctcacagaccaggcacggggytgggctggcaacaggcctgctcagccctgcgggggccatggggcagactgcaggcctccaacgacgttgagggcacccaggagccaggaaagagttcaag

SEQ ID NO: 18892 - DNA, 201 bp, Homo sapiens
agtccacgccagcccttttggaagaggccttgccaccaggagggcagcattgtccttcaagaggaaactgtgccgtcccagctcctgcctggagcctggtrctcggggcattttggttactaaggggaccctggcctgctaagttagaaaaaggggccaggttttttcctattcttcagcctgctgccattgttgaaaaag

SEQ ID NO: 18893 - DNA, 201 bp, Homo sapiens
gggtgtggtggcatgcacctgtaattcaagctactcaggaggctgaggcaggagaatcgcttgaacctgggaggcagagattgcagtgaacccagatcacrccactgcactccagcctggcaacaaagcaagactccgtctcaaaaaaaaaaaaaaaaaaattagccgggcatggtggcgggcacttgtaatctcagctac

SEQ ID NO: 18894 - DNA, 201 bp, Homo sapiens
ctagacccttcccctttgcttggaggtcccattactgctctcagaggtgctgccttgggtgctgtcttggccatgagagtagatgatgcttactggctttrggcgtcacccagaagagaattttttacttaatcctctcacaaccctatgtaacaagttgttatagacccattttatggataaagaaattgaggttcagct

SEQ ID NO: 18895 - DNA, 201 bp, Homo sapiens
aatcagctgggtgtggtggcatgcacctgtaattcaagctactcaggaggctgaggcaggagaatcgcttgaacctgggaggcagagattgcagtgaaccyagatcacgccactgcactccagcctggcaacaaagcaagactccgtctcaaaaaaaaaaaaaaaaaaattagccgggcatggtggcgggcacttgtaatc

SEQ ID NO: 18896 - DNA, 201 bp, Homo sapiens
tgtaatgtgagggcttgacaaaggaggctgggctggagttgtgttctaacggttgcatgtgagttccaggaagaaaggctttaggtgttgttaaactgagytcacttattcagtaggttaagacccaccatttaaaatgaacagagtttaccaacagcacatccattttctttctgtctcactctccgagggttcaatgtg

SEQ ID NO: 18897 - DNA, 201 bp, Homo sapiens
gcccaggttggacaaccacaaagtcgtagaaccatgaaaaaatagctggtgaggccagccacggtggttcacacctataatcccagcactttgggaggctraggtgggcggatcacgaggtcaggagatcgagaccatcctggtcaacatggtgaaaccccgtctctactaaaaatacaaaaatcagctgggtgtggtggc

SEQ ID NO: 18898 - DNA, 201 bp, Homo sapiens
agttctgccctcaaggagtgttaggtaggagagagaaatgcatgactaaagacaatcagaaattaaaccaattcaggaaaaggagtagaaacgcatttcgstgcggttagactagggctgtgttaatcctcgctgtgtaatgtgagggcttgacaaaggaggctgggctggagttgtgttctaacggttgcatgtgagttc

SEQ ID NO: 18899 - DNA, 201 bp, Homo sapiens
gcgatcctcccacttcagactccaaagtgttgggattatggatgtgagccacctctccaggcccaatattttcttttaagggatagatagggccgggtgcagtggcttacgcctgtaatcccagcactttgagaggtcaaggtgggcggatcacaaggtcaagagttcgagaccagcctagtcaacatggtaaaaccccgt

SEQ ID NO: 18900 - DNA, 201 bp, Homo sapiens
ggaggaggcgttggctgcatcggggggaggatggtgccttgagtgagcctgccagggtgtgctgaggccctccccaaggccacttgtctttttgttgtttytctggttataaaaatagcacctgctcttcattggctcacgcctataatcccagcactttgggaagccgagagaggtggatcacaaggtcaagagattgag

SEQ ID NO: 18901 - DNA, 201 bp, Homo sapiens
ggcgttagttttgtgcagtgtttccactgtctgatgagaacaaaatacaaatgtataaatgcatgtacaagctataaaatacaattgtacatatgagttakcatttaaaactggcattgcacaaggccaagctaaatgacaaagttcatgccaatataatttacatttttattttttcttataatgacattaaatagtaca

SEQ ID NO: 18902 - DNA, 201 bp, Homo sapiens
ccaaaacttcttggttttaatatggtataatttatcaatattttcctactctacaaagatattttccaatatttcctttttttcgttttttttttttttttactttttaaattttatgtagagatgggctcttactttgttgcccaggctgatatcaaactcctggatcaagcgatcctcccacttcagactccaaagtgt

SEQ ID NO: 18903 - DNA, 201 bp, Homo sapiens
catgatctcggctcactgcaacctccgcctcctggattcaagcaattcttctgcctcagccttccaagtagctgggattacaggtgcccaccaccacgtcyggctaattttttgtatttttagtagagacggggtttcactatgttggccaggctgtctcgaactcttgacctcgttatccgcctgcctcagcctcccaaa

SEQ ID NO: 18904 - DNA, 201 bp, Homo sapiens
tttattttattattattatttttgagacggcatcttgcactgtcgcccaggctggagtgcaatggcatgatctcggctcactgcaacctccgcctcctggrttcaagcaattcttctgcctcagccttccaagtagctgggattacaggtgcccaccaccacgtccggctaattttttgtatttttagtagagacggggtt

SEQ ID NO: 18905 - DNA, 201 bp, Homo sapiens
acaggtatgagccaccatgcccggcctgtttttttaactttttgttttgcaagtattttattttattattattatttttgagacggcatcttgcactgtcrcccaggctggagtgcaatggcatgatctcggctcactgcaacctccgcctcctggattcaagcaattcttctgcctcagccttccaagtagctgggatta

SEQ ID NO: 18906 - DNA, 201 bp, Homo sapiens
ggaactagaatcttatagaaaagttggcagtacagtgtaaagaacttaaaatacacacacacacacacacacacacacacacacacacacacacacacacagtttaaagcacggtattgacctgatgcatcatcacccttgaatgtttcagtgtgcttctcctacaaacaaggttattctcccctctaacgcaatgcaaac

SEQ ID NO: 18907 - DNA, 201 bp, Homo sapiens
agtcagtgattgagttgggatttgaaccaggtaaatgagtaatgattctttctctgagcctgtagggtagctaaacacatttccagcatttttaataggartaaaaagagagtaggaaattaatgacacacaattcacaagtcaggtgcattcattctctgtctttttcctggagaatcctgggtgttttcttttcatcga

SEQ ID NO: 18908 - DNA, 201 bp, Homo sapiens
ggccccagactcggtggagcagctcaggaagcagtgggagaccttcgagtgagccgggccctgagggtgggggatgcaccgaggcccgagggtccgtccaytgctgcggttccgaggctcccccgccactctctctctgcccaggttctgctggtgggaagggatgggacccctctctgctgccccctcctcccctccaca

SEQ ID NO: 18909 - DNA, 201 bp, Homo sapiens
tcagtgcacgctgagctcacctctgctgtggcagggccccgtgctcttgctgtcgaaaccacaaatggaaactaggccatctctgccttctcccctaatcyagaattattcctggtctcctcatggatcgtcatcctctgttgttgctcataaatcggagagggctgggttggaaaccaggaaagacattaaatacttttt

SEQ ID NO: 18910 - DNA, 201 bp, Homo sapiens
cattaactcccaaatacacaccaagtttgggtcactaagtaaatccactaggctcagcataatgagtgacatttcagtaattgatgccctagaatatgttmattgtgaacccatgattcttttcgatgctaaaataaaggcttgggtagttttggctttggagttgagctagcgcagaagaatagtcaccatcgattaggc

SEQ ID NO: 18911 - DNA, 201 bp, Homo sapiens
aggaactagaatcttatagaaaagttggcagtacagtgtaaagaacttaaaatacacacacacacacacacacacacacacacacacacacacacacacacagtttaaagcacggtattgacctgatgcatcatcacccttgaatgtttcagtgtgcttctcctacaaacaaggttattctcccctctaacgcaatgcaaa

SEQ ID NO: 18912 - DNA, 201 bp, Homo sapiens
cagctaattttttttgtatttttagcagagatgaagtttcactgtgttagccaggatggtctcgatcttctgacctcgtgatccacccgcctcagcctccyacagtgctgggattacaggcagacatcacctttattttaagagtccaggtgtcagtgagaattatcaagatgtagcatcagaagattagaaggtcttcac

SEQ ID NO: 18913 - DNA, 201 bp, Homo sapiens
tcccgggttcacgccattctcctgcctcagcctcccaagtagctgggactacaggcgcccgccactatgcccggctaattttttgtatttttagtagagayggggtttcaccgttttagccgggatggtctcgatctcctgacctcgtgatccgcctgcctcggcctcccaaagtgctgggattacaggtgtgagccaccg

SEQ ID NO: 18914 - DNA, 201 bp, Homo sapiens
gggtaaaagcttgacatacgctgattattcttactgccaatcgcctaagcaaattatgttactttcttccatggtagtactcttccctgcagatttttgtrttgaaagttagctgtttgataacactgcatttgatgatgaacttatgaatgtgagaaggtgttttggaacgttagcaattatagcattgagtggtggata

SEQ ID NO: 18915 - DNA, 201 bp, Homo sapiens
tgcgcttcccaagtgaggcaatgcctcaccctgcttcagctcgtgcacggtgcccgcacccactgacctgcgcccactgtctggcactccctagtgagatsaacccggtacctcagatggaaatgcagaaatcacccatcttctgtgttgctcacgctgggagctgtataccggggctgttcctgttcggccatcttcttt

SEQ ID NO: 18916 - DNA, 201 bp, Homo sapiens
tgagctatggtgggctccacccagttcgagcttcctggctgctttgtttacctaagcaagcctgggcaatggcgggcgcccctcccccagcctcgctgccrccttgctgtttgatctcagactgctgtgctagcaatcagcgagacaccgtgggtgtaggaccctctgagccaggtgcgggatataatatcgtggtgcgcc

SEQ ID NO: 18917 - DNA, 201 bp, Homo sapiens
agggacatttaagtctgcagaggttactgctgtctttttgtttgtctgtgcccttcccccagaggtggagcctacagaggcaggcaggcctccttgagctrtggtgggctccacccagttcgagcttcctggctgctttgtttacctaagcaagcctgggcaatggcgggcgcccctcccccagcctcgctgccgccttgc

SEQ ID NO: 18918 - DNA, 201 bp, Homo sapiens
gtgcccctgctggggggtgcctcccagttaggctgctcgggggtcaggggtcagggaaccacttgaggaggcagtctgcccgttctcagatctccagctgygtgctgggaaaaccactgctctcttcaaagctgtcagacagggacatttaagtctgcagaggttactgctgtctttttgtttgtctgtgcccttccccca

SEQ ID NO: 18919 - DNA, 201 bp, Homo sapiens
tcttggaggctttgctcatttctttttattcttttttctctaaacttcccttctcgcttcatttcatcttccattgctgataccctttcttccagttgatygcatcggctcctgaggcttctgcattcttcacgtagttctcgagccttggttttcagctccatcagctcctttaagcacttctctgtattggttattcta

SEQ ID NO: 18920 - DNA, 201 bp, Homo sapiens
ggcctgccttgctagattggggaagttctcctggatcatatcctgcagtgttttccaacttggttccattctccccatcactttcaggtacaccaatcagrcgtagatttggtcttttcacatagtcccatatttcttggaggctttgctcatttctttttattcttttttctctaaacttcccttctcgcttcatttcat

SEQ ID NO: 18921 - DNA, 201 bp, Homo sapiens
cccctgcgtgcacccctcaagccctcaatgtgcttgggctggagtccgcttgctcctcccctgaaggcctgggtgggagagtgcagcctgctctgtccccsacaggccgcagccgtatcggacactcagggagtcagacagcgcggaaggcgacgaggcagagagtccagagcagcaagtgcggaagtccacaggccctgt

SEQ ID NO: 18922 - DNA, 201 bp, Homo sapiens
cctgaaggcctgggtgggagagtgcagcctgctctgtcccccacaggccgcagccgtatcggacactcagggagtcagacagcgcggaaggcgacgaggcrgagagtccagagcagcaagtgcggaagtccacaggccctgtcccagctccccctgaccgggctgccagcatcgaccttctggaagacgtcttcagcaacc

SEQ ID NO: 18923 - DNA, 201 bp, Homo sapiens
tgaaagatatgacaacttgataaaaagaacactgcctgaactgactaattttctttttcagaaaatgtagaattaattctgagttgttcccagaaaaacayactttgggcacatgaataattcaacctatatatttttttcttccacttatgtgtcacagtttaacaagaacccagtgatcaatcctcagctaccagagtt

SEQ ID NO: 18924 - DNA, 201 bp, Homo sapiens
gagaattcaacagcagagatagagaaagccagaatgagatctttctttctcattttgatatacattaagctgtaaccctgcatttcctacataaaatgtcmtatgtgtacttgtgtgcatgattgttgtttgtgagtgccaactcctggtgaagctaccatctgcattatttatccaggtttaagatgcagcttctttgat

SEQ ID NO: 18925 - DNA, 201 bp, Homo sapiens
gggtggcagaccgcaggggagtagctgaattgggttaatgagggaaaaggtgctttttttttttttttttttttcatattctgccttaagctaataaaaartttaagcctggacgttttcgatggttcatcctttatctctgacaaatatctgactgtatgtttcatgggagaacatgggtagctgaatttaagtaagttt

SEQ ID NO: 18926 - DNA, 201 bp, Homo sapiens
gtgtgtaataaaatccaggcaagtggtgggtggcagaccgcaggggagtagctgaattgggttaatgagggaaaaggtgcttttttttttttttttttttycatattctgccttaagctaataaaaagtttaagcctggacgttttcgatggttcatcctttatctctgacaaatatctgactgtatgtttcatgggagaa

SEQ ID NO: 18927 - DNA, 201 bp, Homo sapiens
ttcgcaaacttccacagcattcatgctgtaccccagctggggagaaagagaagaacaaggcaggccctgcccttgaggaacttgactcagaaacagagtgrcaagaggttaaatggtatctatgaagtgcgaagaggcacagccagggagctctcctagcctccagtgggcttcgtagaagtcccgctgagctgagtcttc

SEQ ID NO: 18928 - DNA, 201 bp, Homo sapiens
aagcggaggttgcagtgagccaagatggtgccactgcactccagcctgggcaacagagtaagtgagactccatctgaaaaaaaaaaaaaaaaaaaaaaaargaagggacagacattaattggattcttgcagaatgcatcattatacattgttgtgtgtccctaaatgaaagacacagtgagaatgtataataggggaacc

SEQ ID NO: 18929 - DNA, 201 bp, Homo sapiens
ttacatttaaagttaatattgttatatgtgaatttgatcctgtcattatgatgttagctggttattttgctcattagttgatgcagtttcttcctagtctygatggtctttacattttggcatgattttgcagcggctggtaccattgttcctttccatgtttagcacttccttcaggagctcttttagggcaggcctggt

SEQ ID NO: 18930 - DNA, 201 bp, Homo sapiens
gttttccatttgcttggtagatcttcctccatccttttattttgagcctatgtgtgtctctgcatgtgagatgggtttcctgaatacagcacactgatggktcttgactctttatccaatttgccagtctgtgtcttttaattggagcatttagtccatttacatttaaagttaatattgttatatgtgaatttgatcctg

SEQ ID NO: 18931 - DNA, 201 bp, Homo sapiens
tttcaaaaaaccagctcctggattcattaattttttgaagggttttttgtgtctctatttccttcagttctgctctgattttagttatttcttgccttctkctatcttttgaatgtgtttgctcttgcttttctagttcttttaattgtgatgttagggtgtcaattttggatctttcctgctttctcttgtgggcattta

SEQ ID NO: 18932 - DNA, 201 bp, Homo sapiens
ccttgaagcttacccacccgtacaacaagctctggagcctgggccaggacgacatggccatccccagcaagcccccagctgcctcccctgagaagccctcrgccctgctcgggaactccctggccctgcctcgaaggccccagaaccgggacagcatcctgaaccccagtgacaaggaggaggtgcccacccctactctgg

SEQ ID NO: 18933 - DNA, 201 bp, Homo sapiens
tgccccttccagtcaatacctatttaaaaataatcacggcagggcacggtggctcaagcctgtaatcccagcactttgggaggccgaggtgggcggatcaygaggtcaggagattgagaccatactggctaacatggtgaaaccctgttctctactaaaaatacaaaaaaaaattagccgggcatggtggcgggcacctgt

SEQ ID NO: 18934 - DNA, 201 bp, Homo sapiens
attgttataaccctggaatgtcctctcatcacttttcaaggttgatttgactatttcctggccctgtgtgatcattttgctttaatttgttcgctggagtrcatattcaggttcttataggagatagccccagtagcacccctgcagaaagagtacataaaaagtaaactgtgggttctcgcatgtctgaaaaatgtctgc

SEQ ID NO: 18935 - DNA, 201 bp, Homo sapiens
aagacatgactgatttcagtcacccctgaaaggctttgccttcccacctagccctctgcctcttccagatgccacatcgccatttctcaactgcctgtttkgtgcccagcaatttcacacgtgttgtcttggctaagctccctgctccccaaaaaatcttcgcagcctgggcattcagccatgagggagccacggctgtag

SEQ ID NO: 18936 - DNA, 201 bp, Homo sapiens
aggcttccaagtagctgggactacaggtgcccgccaccacgcccggctaattttttttttgtatttttagtagagatggggtttcaccgtgttagccaggwtggtctcgatctcctgaccttgtgatctgcctgcctcggcctcccaaagcgctgagattacaggcgtgagccactgttcccggccaggatcccagtagtt

SEQ ID NO: 18937 - DNA, 201 bp, Homo sapiens
ctcgactggtctgtgaggcacaatgggtatcagaaagcatcagcacacgttgagataggcagggcctgcagcctcccgaatgtggcacctctccaggattstctccctgaccactggtttgcctgcatggtcaagaggacgtacccagcctccaggaccctccctgccagaaatcaccaccacccctaccaagcccaccct

SEQ ID NO: 18938 - DNA, 201 bp, Homo sapiens
gccaccacgcccggcctgtccagtgggaatttcaagtgaactctgaagtccttttaacaggatcccagtagtttcttttcttttatttatttatttatttwttttttttgagacagagtctcatcctgttgaccaggctggagtgcagtgacgcgatcttggctcactgcaagctctgccttccgggctcacgctattctc

SEQ ID NO: 18939 - DNA, 201 bp, Homo sapiens
gagtttcttctatggggcgtgtgccactgtgtacccccagagaccctgcagtcttggttcagagccaccttcttttttttttttttatttttttaagatgmggtctagctgtgttgcccaggctggcctggaactcctgggctgaagcaatcctcccacctcagcctcttgagtagctggaacttcagagattcctttgct

SEQ ID NO: 18940 - DNA, 201 bp, Homo sapiens
tacctacacgagtatacaggtgattgaggctaactcaaacagtgtcttctctcttggagttttgatggttagcatgtttttcagagatgccctcgaaaaargaggctgggattcttgctgtgttccttccttgtagtcatcttcccacttacccccaacaagagtaaatttaaccgagcaggccagaatctacctaatagc

SEQ ID NO: 18941 - DNA, 201 bp, Homo sapiens
tgtgctgacatacattcagctgaggaccactaaccatgcctggaaagttctgggaaggcagggactgccttactcatccttgaacacctaggaaagacccygcacaggagacagatgcccagaatctacttgttggcaggtgaatgtggcatgtggacagtagtggattagtcactgtgtgctcagcaccatgcaaagccc

SEQ ID NO: 18942 - DNA, 201 bp, Homo sapiens
gtcatcacgctgtttcagcaggcacaaaagggcctgctctcttgtttccttaattgttagagagattctagttgttgagggagtttcaggtcctctgcccrtgatcacctcatagaaactcaagcttctggactagaagagttttcatgcttatcaactataatattgattcaaagagcagaccgaggtgctttctgcata

SEQ ID NO: 18943 - DNA, 201 bp, Homo sapiens
atacattcagctgaggaccactaaccatgcctggaaagttctgggaaggcagggactgccttactcatccttgaacacctaggaaagaccctgcacaggakacagatgcccagaatctacttgttggcaggtgaatgtggcatgtggacagtagtggattagtcactgtgtgctcagcaccatgcaaagccctttacgaat

SEQ ID NO: 18944 - DNA, 201 bp, Homo sapiens
agagttaccgcctcgcacggttcttgtggggcaggcctccacaagatgaggaatgtggagcgctgagcagagcacatggcatgctgttggggattagcctragtggcctccatcctgttgctgtcacacgtaagggggttagagtattgttcatccacaacacagctaacagacctagcccatggactgatcggaggcaac

SEQ ID NO: 18945 - DNA, 201 bp, Homo sapiens
caggctggagtgcagtgacgcgatcttggctcactgcaagctctgccttccgggctcacgctattctcctgcctcaggcttccaagtagctgggactacargtgcccgccaccacgcccggctaattttttttttgtatttttagtagagatggggtttcaccgtgttagccaggatggtctcgatctcctgaccttgtga

SEQ ID NO: 18946 - DNA, 201 bp, Homo sapiens
gccaccacgcccggctaattttttttttgtatttttagtagagatggggtttcaccgtgttagccaggatggtctcgatctcctgaccttgtgatctgccygcctcggcctcccaaagcgctgagattacaggcgtgagccactgttcccggccaggatcccagtagtttctaatagctcccttgccttttggtatgacag

SEQ ID NO: 18947 - DNA, 201 bp, Homo sapiens
cccaaagcgctgagattacaggcgtgagccactgttcccggccaggatcccagtagtttctaatagctcccttgccttttggtatgacagagtgtcccagrctcatcatctgtgtttcctcctccagacccagtgtttctctaaggagtcctggttccttttggtgggaaatagtattagaaatcacagcctgggatttag

SEQ ID NO: 18948 - DNA, 201 bp, Homo sapiens
cagaagtaaaaggaagatgtctcatcttattttatgaggtcagctttaccccaacttgaaaaccagataaataatttacaaacaaaaaaaaaaaaaaaaaaggcaactacagaccaatatagatgcaaaaatctttaacaatatattatcaaattgaatccagcaatatataaaaaaggataataaccttttttaaaagat

SEQ ID NO: 18949 - DNA, 201 bp, Homo sapiens
ggatccaaaagagagatgggcaagtagcctttgttaaattagggggctggattgaatggggatatcataagaacacagccgtatatcagcattcctggggmcagagcttttgacctcagcgtctgttaaatatataggggaaaaatgatgatggggtgtaatgattcctcttactttctggctatgtgacctggggcatgt

SEQ ID NO: 18950 - DNA, 201 bp, Homo sapiens
tggagaagttagtggatagcagaaggagttggaggctctgatggtgttaagtggaaaggttccgggattctgctgcctgggagtgttttttcaatcctagygaggcttgtgaccagtgtggctccaccctcctgctgggaagaatcttgaaatatttacttaggtaccatgttctgccctagaggctgtggtttaagagag

SEQ ID NO: 18951 - DNA, 201 bp, Homo sapiens
gtggagaagttagtggatagcagaaggagttggaggctctgatggtgttaagtggaaaggttccgggattctgctgcctgggagtgttttttcaatcctastgaggcttgtgaccagtgtggctccaccctcctgctgggaagaatcttgaaatatttacttaggtaccatgttctgccctagaggctgtggtttaagaga

SEQ ID NO: 18952 - DNA, 201 bp, Homo sapiens
gtgctttctgggcccctaaggaccatttattctaaatgcatttatgcaagcatttccagtggacactgctacagactaggtgggaaccggggagactcggsatatggaacccacaagggcctcgaagagaacagcctaccaagctcccatgtcaggagccatcagcctccagtgtggctttgctgggtcacgtagccacaa

SEQ ID NO: 18953 - DNA, 201 bp, Homo sapiens
agcatggagcacgtccctgcttcctgacgccgtgtctctgacatggtatttaaaaaggaacagcctcgcctgtcaccactgtcacacgcgcgcgctaaccrgcgacacgttaaaccaaacattagaaggggttcgggaagtcatctgcatgggaactccacgcggagacaaggtgggcagaggcgggagcagccgtggggg

SEQ ID NO: 18954 - DNA, 201 bp, Homo sapiens
ccactttggacaggtgtgtaccctggccctcctacctgtctgttttgttttttttttatttttgtttttagcagcagtagcacatgcagcagacggttttkcatttcagttctctttggcagtgcagctccatggaggttttcacatctttaaatgtttatttggtgcaaacatgttttgcaggcaaattttcaaaaattt

SEQ ID NO: 18955 - DNA, 201 bp, Homo sapiens
ccaaagatctcatgttaccaacacttcaccggtgataacagaaaagtgcctctgtgctttcctcctgagcaatctccttcaatcaaagtaatactctcatrgaaataagatgacaaagccactctctaaaagcaacaattattgaatgcccatcaagaaagaaaagagccttgtttccaaaatcaaatccaagtgtatgtt

SEQ ID NO: 18956 - DNA, 201 bp, Homo sapiens
aaggcctatgtgctcaccctgcctgggctcaatggaaaatattgagaattacactgaattgtcagtgcaggtgccattattccaaagatctcatgttaccracacttcaccggtgataacagaaaagtgcctctgtgctttcctcctgagcaatctccttcaatcaaagtaatactctcatagaaataagatgacaaagcc

SEQ ID NO: 18957 - DNA, 201 bp, Homo sapiens
cctaggcgagagcaagactccgcctcaaaaaaaaaaagaaaaaaaaaatcactattctgatttctgtcactgtagcaattttgcccattcttgaacttcayataaatggaatcttgcagtatatgctcatgggtgtggcttcttctgctctacattgtgttggtagaattcatctgtgttgttgtatgtaattgtagttca

SEQ ID NO: 18958 - DNA, 201 bp, Homo sapiens
attttgctttgcgttcattggtccttttaaatgtgtgaatgtgtatctgttgttagttctgggaagttctctgtattttcagaccaagaatgaagttaagstagaaatcttaagagatagctagagtattaaaaacagctgttggctatgtctcatcctcttctcttccagagtattgatttgtcttaatgttttacttct

SEQ ID NO: 18959 - DNA, 201 bp, Homo sapiens
ggatttttccagagaaggtttacatattttgttagtgtcctgaagccactcttagtttgggaccacttcggtttaaattctggggttgagggttttttttktttgtttgtttgtttgtttgttttcagagagtctcactctgttgcctagggtggagtgcagtggcagtatcctggctgactgcagccttgaactcctggg

SEQ ID NO: 18960 - DNA, 201 bp, Homo sapiens
atgaatttttaaacggtacacctcagccccttcagcatgtaagtttgtaactaaggaaacactgcgctgaagctggtttgaagttttgaagaccgtgaaawgagtaaggggtcctaataactatttcgtttcaggtctgtagctctaaattacccttaaaaggactagggcctaccattgtggcatggttaccatatgcaa

SEQ ID NO: 18961 - DNA, 201 bp, Homo sapiens
taatgtgagagtgtcgtgaaacctttggagacagtgccctggacatactgaggtaaattttgttcaaaatcaacagatagcaccctactgtaatctgctarcagcttgtttatctaattgtcaataaaatttctggttcaggaaagaatttatgttatcctgaaacttaacataccatgtccccggaaccaaggagaaata

SEQ ID NO: 18962 - DNA, 201 bp, Homo sapiens
cctactgtaatctgctaacagcttgtttatctaattgtcaataaaatttctggttcaggaaagaatttatgttatcctgaaacttaacataccatgtcccyggaaccaaggagaaataataatagtaactgccaaacacctactgtgtgtcagacaccctgctggatactttacacacagatctctcattctcaaattctg

SEQ ID NO: 18963 - DNA, 201 bp, Homo sapiens
ggtggggattaaataaatgtgcatgtgtgcataattttttcccttttctcctgttaaaatggcaagcaaaatatctggggaacagatatattctgcaagcrgatcttcaccatgttagaatttggggattactcttaatgcaaaagaaatgccccttttatggtttgtatagctccaaattgccggttaaatttaaccggc

SEQ ID NO: 18964 - DNA, 201 bp, Homo sapiens
gacacacagcagccagaccctaaaaggatgaaagcagaagttgccaagtctctaaaggcctatacccaataatgactcggcataattcctgctgtattccrtggttcaaagcaagtcacgaagtcagcccccttgaaggatcctggaaacagactccatggcttgatgggagaattggcatgtgccatagggatgggacta

SEQ ID NO: 18965 - DNA, 201 bp, Homo sapiens
tgactaaaatgtgggggcatgtgggttggtagggggtggtgggcagatgaagctgataagtctggtctcactgaggctaaattgcaaatagtcttgcatcrcatgtcctgctaatgacggtcttttaactcctgaatgcatttgggagcctttgaggtttacattgtgtttttgtcttttcttttttaaactatgcagtgg

SEQ ID NO: 18966 - DNA, 201 bp, Homo sapiens
gctatttggaaggctgaggcaggagactagcttgaaccagggaggtggaggttgcagtgagccgagattgcgccactgcagtccgcagtccggcctgggckacagagcaagactccgtctcaaaaaaaaaaaaaaaagaaaaaatatctagtatctgttgatgtagctccacctccaccactaccaccctggtccaagcca

SEQ ID NO: 18967 - DNA, 201 bp, Homo sapiens
ccatatcatcgcatgtttgtgctttgcagctgtggggaaaggtgttgacacctttcttgtcctctttttacacatgaggaaactgagtctgcagcagtggsaagcctgcttcagtttgagacaaaacaccagcagagtcagagtgtgagtaggctccccactccgttctggatggcagagtggaggccaggctggatggag

SEQ ID NO: 18968 - DNA, 201 bp, Homo sapiens
tgttcaccagctcttcatgggcatctgcactgggggacccagggatgaatcagcccctaccatctctgctgccaggaatgattttcctcttctgttccacytgaacagaaaatcctcccaacccttcaaggccctgctcaggcatcgccttcccttgacaagcccccacctccaccgacttctccaagcccagtcattccc

SEQ ID NO: 18969 - DNA, 201 bp, Homo sapiens
agagatgggcacagctgtctgccgttgcctgcgatagcttctggagactcaagtgtgacaaagtccactgcagtcccggggctaggagaggagaagggtasaagctaagaacctaggtcattcgttcagcaaatcatcactgatgcctactctgtgccacatctgtgaaaacagagatggcaatgacacggttcctgactt

SEQ ID NO: 18970 - DNA, 201 bp, Homo sapiens
ctctaactctactcccttagcagccacgaggagctctacctgtggtttctagcaccacctttgttctgggagctccaggtttctgtttctagctcattcckgtttcacaagcttcagctactagaatgtcttagtcagacttcccaaaccagctgtaccccagttccaccaaggtgtcagcccctctgtacccatacattc

SEQ ID NO: 18971 - DNA, 201 bp, Homo sapiens
atttctcaaattatttttttttgtgtcccttcctatttttggagtggacaatagtgtggaaagtgcctaggttttggattcaggcagacctggattcaaaycttagtcttatctcttattaactatgtaaccattaaaaatctgttttaactctgtgatctgcaatatctttctgtaaaatgggtataacttacctacttt

SEQ ID NO: 18972 - DNA, 201 bp, Homo sapiens
tccaccagtctgtgacaggaagactcttcaggatgtagagcaaaactgaaatgtatcagtcttgaattagatcctggttaaagtttttgacctgcatactmatatttcatgtgtttcctcttcttcctccagctatctcccctggttcgaggtattttataagctgcttaacatcctggcagattacacgacaaaaagaca

SEQ ID NO: 18973 - DNA, 201 bp, Homo sapiens
atttgcattgagttaatctctatcagggactgttgtgttaacaggaggcttcgatgttggagttcccaaaacggctgataaagggaggcagaggtcctcakcgggagggcagagctgagccaccacgtgggtccacgaagcccccaggtggctttcctgtaggtatgtggggtctccttcaagctctaaggggaaaggaag

SEQ ID NO: 18974 - DNA, 201 bp, Homo sapiens
gtgtgatggagaagaggttctgcacggaacttactggaaggtgcgggatgttaaagggaaaacgtgttttcatggaggcctgggcgggggattagctctcygttagagaggctgggtgggaggcctccaatgggaggattggtggcggtttcatcgggagggcttggggtctccatgagaggattagggtctcttcagggc

SEQ ID NO: 18975 - DNA, 201 bp, Homo sapiens
caaacatttaccaagaccctactaaaccaggggactattctagatgcttggaattgcagcagtgaacaaaatgaagtcctagtcctcaaatctcttctacyttaggaagacacagagagtaaacaaagatgaaaatcaacatataatatgtctgatggtaataagtgttatgcagaaaaagaaagctaaggaagaagatag

SEQ ID NO: 18976 - DNA, 201 bp, Homo sapiens
acgtcaagttgcagagctgctattaggattcagcggaggcattggtatctaagattgtgacaatctgggctttatctctgagaaatgactgaaaaaaaaaatgtgtccttgtgatttttcccactccgtcattgatcactctccgttcatgtcctactcccactgccttctcctcgtctccctttgcctcagagaaaacta

SEQ ID NO: 18977 - DNA, 201 bp, Homo sapiens
ggtagtggatggttagacagactggcacccaccggacaggcaggacctagcctcaccctgggggctgtccctgctcgtcagcacctgcccactggagccaygtgacagagggacacagcgtagccaagacatttacaaagcgaggatcctttgtgcctgagtgaagtgatcctttcaaaaatgatcaccagctccccttca

SEQ ID NO: 18978 - DNA, 201 bp, Homo sapiens
cttagatggagctcctccctggctccattctgcctctaactctactcccttagcagccacgaggagctctacctgtggtttctagcaccacctttgttctkggagctccaggtttctgtttctagctcattcctgtttcacaagcttcagctactagaatgtcttagtcagacttcccaaaccagctgtaccccagttcca

SEQ ID NO: 18979 - DNA, 201 bp, Homo sapiens
ggaggaaaaacttgccaatcaaaaaagagaaatcagattctggacattcataacgattgagttgaacattcgggagctatgtgattaggcattcagcgtgkcctcctcgggtggtattcctctcgttatagagagctggagaaggccagagagctccacggtgaggccagggctcctgatgtaccatggaagaactgagaa

SEQ ID NO: 18980 - DNA, 201 bp, Homo sapiens
ctttcctccatgtcccaccattctctcttagctgagaagttaggagcaaccaagtatcaagtttctcatgtgcagaatttaatgagtactaaggggatatrttttgttgatcaaagtgtatatttgttttgcaatgaaaataattggaacttgtgttcattatataattctggctgagttatttttatttggtaagaaaca

SEQ ID NO: 18981 - DNA, 201 bp, Homo sapiens
ttccctgatcttccaagtctccacgctccctgtgcacacagccattacagccgtcatcacacgctgttgtaattatttactgtgctgtcctgcctctccarctggaggttttggaaggcagagatcaggcctcccttggcctggtgtcttcagaaccctcacgacgtgtctgcagggatgagactgagaaatggattcacg

SEQ ID NO: 18982 - DNA, 201 bp, Homo sapiens
ttctcagagtgaccatgaatcagagcctgccttctaggaacttgcagtgtgctggggacagtccacctgggtacaggtggtggttggtggagacatttagkgggaaatgaggtcctcttcatctgaatgattcaagtaaggtttccccaaggaagtaccatgaagaaggcagccaggagtgagagtgcacaaaatgctcag

SEQ ID NO: 18983 - DNA, 201 bp, Homo sapiens
gctattcttcggtaccactaggggcaaagtgtctaaatttgacccccagaaatcagatccctgatccaagccaaattcctctggggactagagattcttcrccacactggatggaagagcatagggcagggactccctgtaacggacactctgtggatgtcttctggatgaaggagtgtctgacatctgagagaagtggca

SEQ ID NO: 18984 - DNA, 201 bp, Homo sapiens
taaaccacgcaacaggccagatgcggtggttcatgcctgtaaccccagcactttgggaggccgaggtgggcggatcacttgaggccaggagttggaggccrgcttggccaacatgacaaaaccctgtctctactaaaaatacaaaaattagccgggcgtgttggcgggcgcctgtaattccagctactcaggagactgagg

SEQ ID NO: 18985 - DNA, 201 bp, Homo sapiens
tttcttttaaaccacgcaacaggccagatgcggtggttcatgcctgtaaccccagcactttgggaggccgaggtgggcggatcacttgaggccaggagttsgaggccggcttggccaacatgacaaaaccctgtctctactaaaaatacaaaaattagccgggcgtgttggcgggcgcctgtaattccagctactcaggag

SEQ ID NO: 18986 - DNA, 201 bp, Homo sapiens
tcattaccattctggtgcttaagcagtgcctagcctgtaataggtgtacaataaatagtttggttttcatttatcactcacttttaatacctccctgtcastgcatcagcagtaaactggattaacacgaagtctcatttggtgtcagttgtggaataacacagtcagctaccactcgcatcccttgaggttctggctctt

SEQ ID NO: 18987 - DNA, 201 bp, Homo sapiens
gcttaaaaggtcattatctgttctctgaagggaaacttttatcccgggttgattagttttatcctgggttgataagtgtttatgcaaaagaagtaggggtrggaaaaacctggtactcactgaactcctacttcttgccctttatgtatattttcttggttaaatgtacacagtattatccccaacttgctaaataagaaa

SEQ ID NO: 18988 - DNA, 201 bp, Homo sapiens
accccccaaacttcagtgaatttgctgacgttttattagctaccaattactatctaacagatgtctaatttcttaatgtattctctttctggaggcacacrggtagaggaaagcttgcaaagtgttcgatggaatatttgagtgttggagaggcactgtgtgtgcactgtagtttggtactggctaaggaaggttgagatt

SEQ ID NO: 18989 - DNA, 201 bp, Homo sapiens
ccagggaactcagtgtgcaaaggtcaccctcctgtctgtagagagcagagcagaaaagtggggtgagtctgaggtcaagcaggctgagaaccagcactgcsagatcccagagaataaggctatttggtgatcgctccccctcatcccttccccaggcaaatgaatagcataatgaagtgaaagaccccttgacttgaagtt

SEQ ID NO: 18990 - DNA, 201 bp, Homo sapiens
aaataagacctggtcactgttaaagacagtgagaggcagagaaggaaaggaagcagagagttgcagtaaggggtgggaactgctatagtagaatgtgcaasctgggagacatttcagcacagggctaatcactgcagattgggtgctgcggggaagcttcccagggacggatgtgtctggaataaggccttaccggaggaa

SEQ ID NO: 18991 - DNA, 201 bp, Homo sapiens
aaaccagaaggcctggaattttccaaccaagcttcaagtcgtggtcatcaccatgtcacctagatggtttttaaactatagatttaattttggcaaattcycctcttctaaaatatgatgtaacaacattccccatgtaagattgcttggggcagccaggcatggtggcacatttaagaccagcctgggcaacatagagag

SEQ ID NO: 18992 - DNA, 201 bp, Homo sapiens
agtgtcagaagagagggaagatgcccaggagggggctccaggccacctgccgagtgaagatcaaagggttgaaaggtcagagggctcagctcccttaactrtatctgtctgtgcaatagctatttcagattgtaaatcttggcgatttcattaagtcctcctggctgctactggggcattgaaataataaaattttatatc

SEQ ID NO: 18993 - DNA, 201 bp, Homo sapiens
cagtgtcagaagagagggaagatgcccaggagggggctccaggccacctgccgagtgaagatcaaagggttgaaaggtcagagggctcagctcccttaacygtatctgtctgtgcaatagctatttcagattgtaaatcttggcgatttcattaagtcctcctggctgctactggggcattgaaataataaaattttatat

SEQ ID NO: 18994 - DNA, 201 bp, Homo sapiens
caggctctcagtaattttacggaataccagtgcagtccaccggtgtaatttggggtgcatgtgtgtaaacaggtgatgtttctttttttttttttttttttgccatttcattaaattcatccgatttctgccatggcagaaaattttattattttagtaatgcggtcaagtcatgaaataaattgtgtcttccttagattg

SEQ ID NO: 18995 - DNA, 201 bp, Homo sapiens
agggccccaggcttggcttaatgctctgctgtcaccgtcctgaaattcctaacatttttacctttgaactggtgtggggatgttttgtttgttttgtttcragacggagtttctctcttgttgcccacgctggagtgcagtggcgcgatctcggctcactgcaacctctgccttctgatttcaagcgattctcctgcctca

SEQ ID NO: 18996 - DNA, 201 bp, Homo sapiens
cagggcacaaacacccagactgagtttcagaatgagaatattgtcaaccacatctatcatcacctctttgaaagagtctagtccataaccagttactgttkctttagattattaaatttcagtcaacaaaaacatgacatcgtctcagtggaaatgaattccttatcatttaatcatgatgtttttgatcccttactgtgt

SEQ ID NO: 18997 - DNA, 201 bp, Homo sapiens
gagaatcccaagactggaaggattgtgtggccttattgcctattccatgctcgagtctcccctacaacatcctcccatgaggctttccagcttctcttgcmtacctctggtgccagggaacttacttccttctgaagcaacctttccatctttgaaatgctcctgtttttaggaatgttttcttattttagtgtaaagcat

SEQ ID NO: 18998 - DNA, 201 bp, Homo sapiens
tataattttgctgaggcacatatctgaattgctcatgtcatgctgcagatctggggtttgcaagtaaaacacttaaccagcaagtgacctacccagctgtmctgagttcccatttcaataaagctttgtggtgcttttacagtaacttttgtaggggtctgaaaatgacgttaaaaattcatctgtaccttgctgtacttt

SEQ ID NO: 18999 - DNA, 201 bp, Homo sapiens
agttttcttcttcccattctgaattatttccccctctctacttgatcttccccttattgtggaagcatgtagctatttctcctatcttagtggatgggagyaggaaaacatcctcttgaactaatactgttctcccattaggtctctatttcctcttccctttacagcaaaattcctttaaaaagttgctgaatttgttgt

SEQ ID NO: 19000 - DNA, 201 bp, Homo sapiens
ctcttctaattccattttgcctaaactagccttgagttgtttgtgttccccaagtgtttactcccagcaagatggaggcagcccacgcatgctggatggcmgcaggaagtcaatcttggatttcagaaattgccatagataagaatcagctgcaaataatcatggcccaacccataagagacagtgttggcaatgataaag

SEQ ID NO: 19001 - DNA, 201 bp, Homo sapiens
cagcctctagttgtgatctattaggcaattgcaatttgttaaatgtctggggccgggcgcggtggctcacgcctataatccaggcacttttggaggcgggyggatcacatgaggtcaggagttcgagaccagcctgaccaacatggagaaaccccatctctattaaaaatacaaaattagctgggcatggtggcgcatgcc

SEQ ID NO: 19002 - DNA, 201 bp, Homo sapiens
cagggcatattactgttatctctgttatgtgagtttgtgttatacaatatatctaaatggctttcttagaaaatagaacatatctttcttatgtctgtatscatatggccatttcattgcctggcaatcccattcactaactatattctagctagatgatctggatatgtatgtagataatatagatagattctgctgctc

SEQ ID NO: 19003 - DNA, 201 bp, Homo sapiens
acacacacacacacacacacacaccttggtgagctatttttcctagagatataaagatccaaagactaaagaagccaagattctgacaaattaaaactaaygtatgctggcaaaataagaaactctaaaaaattaatgcagaatttagtgaaagaatttacagcattgatattatcaattatctaccaataatattaaatt

SEQ ID NO: 19004 - DNA, 201 bp, Homo sapiens
atctataccaaaatgtgggtcgactctgggagcatcgtaattccctatgataacataggtaagtcatccatctgtaagactgttgactgttaccctcaaaytctctgcttaccccctgctaggctctcagaccaggctcacacctgaccgttattgccctagtaggagtttttgcctgatttcattataaagtcacccctg

SEQ ID NO: 19005 - DNA, 201 bp, Homo sapiens
tgagatatgggtggggacagagagccaaaccatatcactcccaaaacagcaggatgcaaggatacccaaggggggtttttctggggcatctcagcagtacrtgtgtcaacgccactctttcacatctttttttccattattccctccttactccccctcatttatctttttttttcctactcttagtacccttagtcatta

SEQ ID NO: 19006 - DNA, 201 bp, Homo sapiens
gccgtggggcatttgtgttggcttcctctgtcagtttggaatcatgcccctcacaggattcatcctgtcggtggcctttgacatcctcccgctccaggccrtagtggtgctcattataggatgctgccctggaggaactgcctccaatatcttggcctattgggtcgatggcgacatggacctgaggtaagattatctata

SEQ ID NO: 19007 - DNA, 201 bp, Homo sapiens
tatatctgcaatgaccctgttcccacataatgtcacatcctgaggtgcggagtgttaggacttcaacatatgaatttgggggaaagggagacataatcaayccataacagctgcaaacactgaagacaggatcaaaatccttagcccttcatcaatcacattcatcctatttctgaatatgtcattctaaataggcccatt

SEQ ID NO: 19008 - DNA, 201 bp, Homo sapiens; identical to SEQ ID NO: 4792

SEQ ID NO: 19009 - DNA, 201 bp, Homo sapiens; identical to SEQ ID NO: 4794

SEQ ID NO: 19010 - DNA, 201 bp, Homo sapiens
atcactttcttatactgctttaaaaggatgtttgaaaaagaaacaacctatgaaaagttagaagttgttggtgctaaattatatgaaatcagctattggamaaatgagtgttaaataacatggagaaacaaaccacatgtcgcaaaaacagcagtaaatttaacatggtgaaattgaagtatgactcttttatctggccag

SEQ ID NO: 19011 - DNA, 201 bp, Homo sapiens
tagacaggcactttacagagagaacatgggcatatgaggcatacgtaaaacaaacagagcatggggaaagaaaagagcaagatcaccagcccactggagaycaaagttacaacatccacctctacaagcagaagccacacactgtgggtgtaaagaaagacagagtccctttcccagtcaaccccaggtccctgaaaaact

SEQ ID NO: 19012 - DNA, 201 bp, Homo sapiens
aatcaaaaccatagggttttccatccatgaaatggtttcattctcattatatgattactgttgagtgggggcctgaagtcattagccatgcagtcttctcytttagaatgtccttctttatatgtgtgtagagagagagaggtgggatctcactatgttgctaatgctgttcttgaactcctgtgctcaagtgatccttcc

SEQ ID NO: 19013 - DNA, 201 bp, Homo sapiens
ggcatattactgttatctctgttatgtgagtttgtgttatacaatatatctaaatggctttcttagaaaatagaacatatctttcttatgtctgtatgcayatggccatttcattgcctggcaatcccattcactaactatattctagctagatgatctggatatgtatgtagataatatagatagattctgctgctcggg

SEQ ID NO: 19014 - DNA, 201 bp, Homo sapiens
gaattacctgagactggataatttataaagaaaagaagtttagttggctcacagttccacagactgtacaggaagcatggcaggggaggcctcaggaaacktacaatcatggcagaaggggaaggggaagcaggcagcttctacatggctggagcagaggaagagagcaaagaaggaggtgtgcacacttatagacaacca

SEQ ID NO: 19015 - DNA, 201 bp, Homo sapiens
ggaagctggggcgacattttatccccaattacaaataaagaaactacagttcagaaagttcctgatttactgaaggaaacagaataggagtagttgaatcyggaagccaaatcttccaggctgtcattgaaatgggttgtctttttgttctgacaaggataattttcaagtcagaaaatcttcagactaattgcaaatggt

SEQ ID NO: 19016 - DNA, 201 bp, Homo sapiens
atctatacctctaactactgcaatcaccttggagtaatccttccagaagcctatggcattctgaatgtccaactgatttgccacgcatctaaagtatgacyaaggaatcaaacaggagagaataaatgcattcccgtgccttctagcacagctgcttagctattggaattgggggatttatattttgtgtttgtgttttta

SEQ ID NO: 19017 - DNA, 201 bp, Homo sapiens
ctggagccagacatcacaatctaagctaaaacctgactggctaataatttaaaacttttctaaataggtataggcaatagacaacaaaggaaaagaggacrttgcttgtgaaaggacttagaaaagtaataatatttccaaataaggaaggggcataggctgcaagctggaatgtacctgtgagcatgttcagcataaata

SEQ ID NO: 19018 - DNA, 201 bp, Homo sapiens
tcaggtgcaggtgcccaggtgtgagcggctaggtgcagatgctcaggtgtggcagcagggagtgcacttggctcatctgccctggggagggccagctcccracagaagtaggccagaggtcagtcccaggaaatgcttggagcagccagcagggtagggccaagtcatgatacacctaggagtgggaggggaggcctcttt

SEQ ID NO: 19019 - DNA, 201 bp, Homo sapiens
acagctgcaaacactgaagacaggatcaaaatccttagcccttcatcaatcacattcatcctatttctgaatatgtcattctaaataggcccattcattcygaagtcatgcaagtccccagaaagaaaatactgactgcctcttttttgctcaaagtcttctggaccattcggcttacaaggcagatggggctcttccatt

SEQ ID NO: 19020 - DNA, 201 bp, Homo sapiens
gtacccagtgatcaattaggaacctgctgtctcatttcaactggtgctggtttctccagaagctttagaaaagtcatacaaaccctataccttcatatggyttagtctttcacataagaaaacacatgatatccaccttgcaattgctttttttttttaaggaaagccctataaaacaacataggatggcaagtgctattc

SEQ ID NO: 19021 - DNA, 201 bp, Homo sapiens
tataaattcaaggcagtgtatgtattttttatatacatgccttttatagaacttcagattttttcgtgtaagataatattttcttttgctaatttaggctyctatattatttcttaaaattcgttatctgtgaattgttttaaatctcattttgagtggtttgattttgttcttacattcattcaaatagcatcaacttcc

SEQ ID NO: 19022 - DNA, 201 bp, Homo sapiens
acccataatacccttaagaaattactactcttgacaacctcaatgacgacctgttgagagaagggcctttcagagaaatttctcatttctctaagtttccygattctatttggtggaacacaagatacaaaaacatggtaacataaatgatcacagcagagagatgcagggtgcggtggctcccgcctgtaatcccagcac

SEQ ID NO: 19023 - DNA, 201 bp, Homo sapiens
aacttgattaaagaccaagttatggattcaatgtgtaaccatgagtggatgctttttcatctacatagacaggcactttacagagagaacatgggcatatraggcatacgtaaaacaaacagagcatggggaaagaaaagagcaagatcaccagcccactggagaccaaagttacaacatccacctctacaagcagaagcc

SEQ ID NO: 19024 - DNA, 201 bp, Homo sapiens
gccgtagtggtgctcattataggatgctgccctggaggaactgcctccaatatcttggcctattgggtcgatggcgacatggacctgaggtaagattatcyatacctctaactactgcaatcaccttggagtaatccttccagaagcctatggcattctgaatgtccaactgatttgccacgcatctaaagtatgactaag

SEQ ID NO: 19025 - DNA, 201 bp, Homo sapiens
cttttacaattgagggaacttaggcacagaatgattaagtaactttcccaatgtcacttagctggcaaagggtgaaacttgaactccagaagtttagctgkatattctgttctgttgaccacagcactcaagtacataatatttatccaaaaatacacagtgtcaaaattctcataaatacatcacattagaataaaattc

SEQ ID NO: 19026 - DNA, 201 bp, Homo sapiens; identical to SEQ ID NO: 4793

SEQ ID NO: 19027 - DNA, 201 bp, Homo sapiens
tatttaacctctatttttacattctattttttttaataaaaaagctagtttttaaagcctcatgacattgtaatgaggaatataaagtgaaggcacgcaasaaaactaatgtaaatgttaggtcacaaaatgtccagagatatagtttggttttgtttggttttgcttttctctctctctctcttttctttttttcttttc

SEQ ID NO: 19028 - DNA, 201 bp, Homo sapiens
aaaacatgacttgaatctgcaaccaaatgggcttgttgaaaccaccctttcctccactgcctcacacatgtgcagacatgtactcacacatgcatagacaytgcaggtcttgcctcgcagggcagagcctaccctgatgagctgacattaaaaataagctgagaaatgcttgctatcagagaccagcagctccacagaaaa

SEQ ID NO: 19029 - DNA, 201 bp, Homo sapiens
gcctccagtctacagaaaatgtgatctgccatgtgaatcataggttataatctctatgcaaagtaattttgcagtttattattataaaatttacttaactrtctgtgtattgttttctagtttatgtggcatacaagaaatgtcatggaaaaaacaaggcagaaattccagagagcaaagaaaatggaacggagccagagt

SEQ ID NO: 19030 - DNA, 201 bp, Homo sapiens; identical to SEQ ID NO: 4799

SEQ ID NO: 19031 - DNA, 201 bp, Homo sapiens
taacacactaagtggcaccgcctgctttcagcccagacagtgtgtggctttagagctcaggctttaaaggcagagaatgtacgctgtgtacagatcccttygaagaggacccggaagactcactccccaaaaatctttctttgacccactgtcctagtactagagatagcatcatttggcattaatgtctccatgtagata

SEQ ID NO: 19032 - DNA, 201 bp, Homo sapiens
gacgatgctacaggttgagacagattcttgcaggactttcttatcatgaatcgaaaataaaaattttctcccattcgggaggttgtttgtctactctgctkatagtttcctttgctgtgcagaagctctttagtttaattagattccaagaaaacaatgaacaaacccattaaaaagtgggcaaatgacatgaacggatgc

SEQ ID NO: 19033 - DNA, 201 bp, Homo sapiens
tcttccctagaacaccacaggtggatgtatcaatctgcccattgcctttcagcgtcagcatgaccacatgctccacactgcttgccctcggaatgatgccrctgtgcctccttatctataccaaaatgtgggtcgactctgggagcatcgtaattccctatgataacataggtaagtcatccatctgtaagactgttgact

SEQ ID NO: 19034 - DNA, 201 bp, Homo sapiens
aatggtttcaaaatagagcactgagtaagcaatccagagtgttacaacagaaaactgctagacgaaacacactgtttctaacactcgactgtgagccacaycttgacccaaaagttgatttaatggcaaagtcatgctccaggagtcaaatttactagtaatgactctgtctcatttcaccctcatcccaaaaaccttatt

SEQ ID NO: 19035 - DNA, 201 bp, Homo sapiens
tctttcttcaggctgcttgttcttctgtttttctctttcctgtgtcacctgttctgctgatcacattgcccttctgtcatctttaggtacatctctggttkctctcgttgttcctgtttccattggaatgtttgttaatcacaaatggccccaaaaagcaaagatcatacttaaagtaagtatcccagttcacaccattaa

SEQ ID NO: 19036 - DNA, 201 bp, Homo sapiens
tgagacactgcgcccagcctagcatgcccttctttattgcagtcacaggaaaaatttctacccattctttaagacactccactgaactatcacctcttggktttactctattctgtcctcagggcatattactgttatctctgttatgtgagtttgtgttatacaatatatctaaatggctttcttagaaaatagaacata

SEQ ID NO: 19037 - DNA, 201 bp, Homo sapiens
gtggtgtgatctctgctcactgcaagctctgcctcctgggttcacgccattctcccacctcagcctcccaagtagctgggactacaggtgcccgccaccaygacaggctaattttgtttttgtatttttagtagagacggggttccgaggcgggcagatcatgaggtcaggagatcgagaccatcctggctaacacggtga

SEQ ID NO: 19038 - DNA, 201 bp, Homo sapiens
aagttttctcagcaaggcaattttactttctgcagaaagagtgctcctcacagatggcacaatggtgacagcacacctgaacaatggagggaagtaattcrtatcccttatgcagcttgtccctgctactgtgtcctgtctccattggctggagccagacatcacaatctaagctaaaacctgactggctaataatttaaa

SEQ ID NO: 19039 - DNA, 201 bp, Homo sapiens
taagctttggggacatgggagcttgcacctattccttaacccagagtgtcactagttaatggtcataggattttgcatccagacacttgaattgaagaaaytttttttttttttgagatggagtctcactctgccacccagcctggagtgcaggggcgtgatctcggctcactgcaaatttcaccccctgggttcaagcaa

SEQ ID NO: 19040 - DNA, 201 bp, Homo sapiens
gaaacataactaatgggtactaggcttaatacctaggcaatgaaataatctgtacaacaaacccccatgacacaagttgacctatataacaaacatgcacrtatacccctaaacttaaaataaaagttaaattaaaaaataaaaataaaacagcatcttccctagaacaccacaggtggatgtatcaatctgcccattgcc

SEQ ID NO: 19041 - DNA, 201 bp, Homo sapiens
gcggtggctcccgcctgtaatcccagcactttggaaggcctaggcgagcggatcacctgagcccaggagtttgagaccagcctggacaacatggtgaaacyccatctctacaaaaaatttaaaaattagcctggcatggtggctcatgcctgtattcccagctactcgggaggctgaggtgcaaagatcacttgagcccag

SEQ ID NO: 19042 - DNA, 201 bp, Homo sapiens; identical to SEQ ID NO: 4787

SEQ ID NO: 19043 - DNA, 201 bp, Homo sapiens
tattacaatgtttgtagcctcttctctctctcctactcttaccattaccattagaccaaaaaaaaaattgtcctccttgacatgccctattcagtatgggyttttgatatacaagattcttcagactccaggagagaaccttaatatcatatataacctcctgacaagagactttagggtgaccctccactaccacctgct

SEQ ID NO: 19044 - DNA, 201 bp, Homo sapiens; identical to SEQ ID NO: 4790

SEQ ID NO: 19045 - DNA, 201 bp, Homo sapiens
gggtgaccctccactaccacctgcttttgccttcatgctgcttgactctctggctgctctgtcagcggacgccttccatagagctaaaaaccatagtttaygtgagtggtgaccattatatccctctcaaagaacctgtctgctgagtgaggaattttgattccacaatactcactgtaataatttaataatttaagccat

SEQ ID NO: 19046 - DNA, 201 bp, Homo sapiens
cacaaaaagcatcagggagaagagatggtgacttttcaggtgaatctgcttgtggccaaaacccatagttgagaggacacagaaacatcctatctcctttktgtctgctctctccccagacacaggcaaatatccggtgtcttcatccttcttaatggcctcagcgacaccatgcaaggacttctcatttcctttctttgg

SEQ ID NO: 19047 - DNA, 201 bp, Homo sapiens
tccctgctactgtgtcctgtctccattggctggagccagacatcacaatctaagctaaaacctgactggctaataatttaaaacttttctaaataggtatrggcaatagacaacaaaggaaaagaggacgttgcttgtgaaaggacttagaaaagtaataatatttccaaataaggaaggggcataggctgcaagctggaa

SEQ ID NO: 19048 - DNA, 201 bp, Homo sapiens
gttgcttgtgaaaggacttagaaaagtaataatatttccaaataaggaaggggcataggctgcaagctggaatgtacctgtgagcatgttcagcataaatrtcttggttaaagtacaaggacatagaatgtacttattcctttatatctaacagctacatagaatagggcttaacaaagagttactagcacaaagtaaggg

SEQ ID NO: 19049 - DNA, 201 bp, Homo sapiens
ttcaaagcttttttaaaaaagtaatcttttccaaaccacaagctgcagctgaggaggtttatcctgttggtagcaggaaaaaaaaagcaaaatacactttytttgtaatgatgaggagctctgggtgcaatcataaaataaaactgtttgtcaaacattagaacctgtagtgagacagtggtcaactccatcaaatatagc

SEQ ID NO: 19050 - DNA, 201 bp, Homo sapiens
ccatgtagatagcctactcagccagaccctcttattaaaatgcaaacactctgagcagggatgataccagacactagttcttctgaacacacatttgccarattgccaataacttactcagtgctaagaatttatgtctaccctgccgcttgcatgctttcttttgatttttaagtcagcttccgcttcttgtcccaagct

SEQ ID NO: 19051 - DNA, 201 bp, Homo sapiens
attacaaataaagaaactacagttcagaaagttcctgatttactgaaggaaacagaataggagtagttgaatctggaagccaaatcttccaggctgtcatygaaatgggttgtctttttgttctgacaaggataattttcaagtcagaaaatcttcagactaattgcaaatggttgctacatgtcctattgtgttcttaaa

SEQ ID NO: 19052 - DNA, 201 bp, Homo sapiens
ggaattttaatctgtaatatctgttgtattcctttgctagaggtgccataagacagaaccacaaactgagtggcttaaacaacagacacttattgtctcayggtttcagagactagaagtgaaaatgaaggtgtcactgaattgattctttctaagggctatgatggagggatcccttactggccttcctcgtggcttgca

SEQ ID NO: 19053 - DNA, 201 bp, Homo sapiens
tctcattgctataaagaattacctgagactggataatttataaagaaaagaagtttagttggctcacagttccacagactgtacaggaagcatggcagggraggcctcaggaaacgtacaatcatggcagaaggggaaggggaagcaggcagcttctacatggctggagcagaggaagagagcaaagaaggaggtgtgcac

SEQ ID NO: 19054 - DNA, 201 bp, Homo sapiens
cttgcctcgcagggcagagcctaccctgatgagctgacattaaaaataagctgagaaatgcttgctatcagagaccagcagctccacagaaaagaggaatkctgatcacccatcagccgagtctcttctctccgggggaaagattgaatgaaggcagggagggaatgggaacgttgttctagttcaagtccttctacagag

SEQ ID NO: 19055 - DNA, 201 bp, Homo sapiens; identical to SEQ ID NO: 4788

SEQ ID NO: 19056 - DNA, 201 bp, Homo sapiens; identical to SEQ ID NO: 4789

SEQ ID NO: 19057 - DNA, 201 bp, Homo sapiens
gcataggctgcaagctggaatgtacctgtgagcatgttcagcataaatatcttggttaaagtacaaggacatagaatgtacttattcctttatatctaacmgctacatagaatagggcttaacaaagagttactagcacaaagtaagggggcttgaagaaagttagtctttaaaagaaattattatttctaatgtttatta

SEQ ID NO: 19058 - DNA, 201 bp, Homo sapiens
agggctgaatgcctgaagaagcttgtggctgccctgagcaaatgtctcctaaagatttatgctaggtcttcctgaagtgcagtcatccctctcgccatgaktagccatagaactaagaatggtgatttctttctctaagcagcctccagtctacagaaaatgtgatctgccatgtgaatcataggttataatctctatgca

SEQ ID NO: 19059 - DNA, 201 bp, Homo sapiens
aagtacaaggacatagaatgtacttattcctttatatctaacagctacatagaatagggcttaacaaagagttactagcacaaagtaagggggcttgaagraagttagtctttaaaagaaattattatttctaatgtttattattattattattttcctttaacaacaagggacactttgaagaggaaactttttactttc

SEQ ID NO: 19060 - DNA, 201 bp, Homo sapiens
cttattcctttatatctaacagctacatagaatagggcttaacaaagagttactagcacaaagtaagggggcttgaagaaagttagtctttaaaagaaatkattatttctaatgtttattattattattattttcctttaacaacaagggacactttgaagaggaaactttttactttctacagatattaaccctgctcac

SEQ ID NO: 19061 - DNA, 201 bp, Homo sapiens
aagagttactagcacaaagtaagggggcttgaagaaagttagtctttaaaagaaattattatttctaatgtttattattattattattttcctttaacaasaagggacactttgaagaggaaactttttactttctacagatattaaccctgctcaccatgtttgcccaggcctccaagctcacctttttgctgttggttt

SEQ ID NO: 19062 - DNA, 201 bp, Homo sapiens
aacggttgcttttgaaacggggatgcagaacacgcagctatgttccaccatcgttcagctctccttcactcctgaggagctcaatgtcgtattcaccttcycgctcatctacagcattttccagctcgcctttgccgcaatattcttaggatgtaaggaatcatgccaatcccatttcatgataatctttgaaaaatcctg

SEQ ID NO: 19063 - DNA, 201 bp, Homo sapiens
tttcattctcattcttctttctacctttctttcctctgatatctactgtgtaaacttgattaaagaccaagttatggattcaatgtgtaaccatgagtggwtgctttttcatctacatagacaggcactttacagagagaacatgggcatatgaggcatacgtaaaacaaacagagcatggggaaagaaaagagcaagatc

SEQ ID NO: 19064 - DNA, 201 bp, Homo sapiens
cagcgtcagcatgaccacatgctccacactgcttgccctcggaatgatgccgctgtgcctccttatctataccaaaatgtgggtcgactctgggagcatcrtaattccctatgataacataggtaagtcatccatctgtaagactgttgactgttaccctcaaactctctgcttaccccctgctaggctctcagaccaggc

SEQ ID NO: 19065 - DNA, 201 bp, Homo sapiens; identical to SEQ ID NO: 4796

SEQ ID NO: 19066 - DNA, 201 bp, Homo sapiens
gcatggggaaagaaaagagcaagatcaccagcccactggagaccaaagttacaacatccacctctacaagcagaagccacacactgtgggtgtaaagaaaracagagtccctttcccagtcaaccccaggtccctgaaaaacttcatctggcctcatctggtcaggaaagaaaagcaattctgccatggatttcagcaggt

SEQ ID NO: 19067 - DNA, 201 bp, Homo sapiens; identical to SEQ ID NO: 4798

SEQ ID NO: 19068 - DNA, 201 bp, Homo sapiens
aagaaagacagagtccctttcccagtcaaccccaggtccctgaaaaacttcatctggcctcatctggtcaggaaagaaaagcaattctgccatggatttcrgcaggtggtgctgcttatgtgttatcccgttggcttgggctgcctcaaaaagatgaatactcttagcaggaggggccaaacagattcagcacattaaaat

SEQ ID NO: 19069 - DNA, 201 bp, Homo sapiens
tcaaccccaggtccctgaaaaacttcatctggcctcatctggtcaggaaagaaaagcaattctgccatggatttcagcaggtggtgctgcttatgtgttawcccgttggcttgggctgcctcaaaaagatgaatactcttagcaggaggggccaaacagattcagcacattaaaatataggaccaaaacctaaccacacta

SEQ ID NO: 19070 - DNA, 201 bp, Homo sapiens
acctaatctttcttcaggctgcttgttcttctgtttttctctttcctgtgtcacctgttctgctgatcacattgcccttctgtcatctttaggtacatctytggttgctctcgttgttcctgtttccattggaatgtttgttaatcacaaatggccccaaaaagcaaagatcatacttaaagtaagtatcccagttcacac

SEQ ID NO: 19071 - DNA, 201 bp, Homo sapiens; identical to SEQ ID NO: 4803

SEQ ID NO: 19072 - DNA, 201 bp, Homo sapiens
tggccagtgatgaagcctggctgggtctggtgggccagcaggtcccgctaaggaggctcatggtgcatacagtttgtccttgttaagtggcgatggggatgggggggttcattgtttttccttaagattattaggtggctttacagaattgaagtctgtgtccgaaggctccccattccaaccccgaaatagagacagagg

SEQ ID NO: 19073 - DNA, 201 bp, Homo sapiens
ggggctcatgctggcgttcatatcgattccccagtgagccaaccccactgagaagccctgttctgtaaactcttcttcaaccttccctcacctctgcttcycttcttcagccccacagtgaagaacatctgagctcaaatccagataagtgacataagtgacctgctttgtaaagccatagagatggcctgtccttggaaa

SEQ ID NO: 19074 - DNA, 201 bp, Homo sapiens
agtttctgcttgggcagaaggagcaacttgcagcctctctaagtccctttcaacgttcctcagctccgcgcttacagagggtggatctcagaaccaggagracaaacagctgctcattgagtcctgagagtgcctgagtgggggcgtccaaggaggccgtggtgtgggcggagcagctggtacagtttgcgcatgggcagt

SEQ ID NO: 19075 - DNA, 201 bp, Homo sapiens
ggtgctgcaagatgtgttgttttcctccaatgcttgaattcttggctccaagagaacattttatttagcctagcctcctaggccatctttttgttggggartcatttgttgcaggataatatcaaaagcacttggacagagaaatcgattagaactgccagtgaaaccaactctggctgtgtagtatgtgctggtgtggga

SEQ ID NO: 19076 - DNA, 201 bp, Homo sapiens
agtgttcccggagaaagtctttggaaggagcactggagtaggagtcagggaagctgagctgtccacctgattccaccacgacctgagtgacctttttcaartcacttttcctctccccgtctcagtttctgcttgggcagaaggagcaacttgcagcctctctaagtccctttcaacgttcctcagctccgcgcttacaga

SEQ ID NO: 19077 - DNA, 201 bp, Homo sapiens
ctgccagtgaaaccaactctggctgtgtagtatgtgctggtgtgggaaaggacctagcctggggctgtggcaatcccgattcatggtgctttcaagtcagrttttcttggaattctgggtttgctggggtcttctgagtggggttgcctgtgctcccctagagggcagccatgaaatgggagcggtggtgcagatgggagg

SEQ ID NO: 19078 - DNA, 201 bp, Homo sapiens
ccacatgtttaccttctcacagcttgccacccctggaagcctacaactgcattcgtcttgtcacctttctcttctttctttctttctctctttcctttcctttcttttcctttcctttcctttcctttcctttcctttcctttcctttcctttcctttcctttcctttcctttcctttcctcctttccctcttttttttcc

SEQ ID NO: 19079 - DNA, 201 bp, Homo sapiens
cacatgtttaccttctcacagcttgccacccctggaagcctacaactgcattcgtcttgtcacctttctcttctttctttctttctctctttcctttcctttcttttcctttcctttcctttcctttcctttcctttcctttcctttcctttcctttcctttcctttcctttcctttcctcctttccctcttttttttcct

SEQ ID NO: 19080 - DNA, 201 bp, Homo sapiens
acatgtttaccttctcacagcttgccacccctggaagcctacaactgcattcgtcttgtcacctttctcttctttctttctttctctctttcctttcctttcttttcctttcctttcctttcctttcctttcctttcctttcctttcctttcctttcctttcctttcctttcctttcctcctttccctcttttttttcctt

SEQ ID NO: 19081 - DNA, 201 bp, Homo sapiens
agtataagaaaagttaaattgcctatgatcttatcacttaatgctagtcactgttaacatttactaacattccctcgaggtgtttttctgtgcttgtacgmacacacacacacacagccagcatcagactgtgtatacagtttaaggcattatttatatgagggcaaaactagacacagtctaacatccagccatggacaa

SEQ ID NO: 19082 - DNA, 201 bp, Homo sapiens
ttaaaacggtttccccactcctggatgtctcagagtcttggatgtggtaatgtgcatcattaatctggaagagaaggaaagacttgtgtgcagggattccmaaacttacacagtagatgagtttttcatggtgttctggagaacacagtttgagaaacactttcacaatgaatccaggcctcaacatacatcagctgctct

SEQ ID NO: 19083 - DNA, 201 bp, Homo sapiens
gcctggggacaggcaccacacaatggcggatccactttggatccactcagtatctccatagctctttattgctgtgattgccccagtcatttagggaactygtcactcatgcagagcgtcactcagcggtggtgcttaggagcatcagcttgcatcggggcaggcttggttccaaagcccaggcctcctccatgtggctcc

SEQ ID NO: 19084 - DNA, 201 bp, Homo sapiens
acttctgtgacgtccagcgctacaacatcctggaggtaacccagccagcccagctggccagatgaaggtgtgggcctgggggtggcttcagggaccgactygccgctatcactctgcctctgtaggaagtgggcaggagaatgggcctggaaacgcacaagctggcctcgctctggaaagaccaggctgtcgttgagatca

SEQ ID NO: 19085 - DNA, 201 bp, Homo sapiens
caaccagccggccctggtccaaggcatcctggagcgagtggtggatggccccacaccccaccagacagtgcgcctggaggccctggatgagagtggtgagycccgggctagaaagccagtgctgcctggcaccctctggccgccccacctggctgaggggctgagcctgggcctgccggtgacagccatccctgtccttcc

SEQ ID NO: 19086 - DNA, 201 bp, Homo sapiens
ggcatttctccacagcagcctcggaacctctatcgccaccctccggggggcccacctgtcccccgcctgcccttcaaggtgctctttgatttctccccagmagaattcacctgctgcatccatcatcagaagaggccaggaatgcggcctgctgggtgggcagggccaagaagaaggcagccgtgcaggcccaggaagccg

SEQ ID NO: 19087 - DNA, 201 bp, Homo sapiens
ggggggcccacctgtcccccgcctgcccttcaaggtgctctttgatttctccccagcagaattcacctgctgcatccatcatcagaagaggccaggaatgyggcctgctgggtgggcagggccaagaagaaggcagccgtgcaggcccaggaagccgtaggagacttgccaacctccaggagggggccagccctggaccct

SEQ ID NO: 19088 - DNA, 201 bp, Homo sapiens
tttaccttctcacagcttgccacccctggaagcctacaactgcattcgtcttgtcacctttctcttctttctttctttctctctttcctttcctttcttttcctttcctttcctttcctttcctttcctttcctttcctttcctttcctttcctttcctttcctttcctttcctcctttccctcttttttttccttttttt

SEQ ID NO: 19089 - DNA, 201 bp, Homo sapiens
ttaccttctcacagcttgccacccctggaagcctacaactgcattcgtcttgtcacctttctcttctttctttctttctctctttcctttcctttcttttcctttcctttcctttcctttcctttcctttcctttcctttcctttcctttcctttcctttcctttcctttcctcctttccctcttttttttcctttttttt

SEQ ID NO: 19090 - DNA, 201 bp, Homo sapiens
accttctcacagcttgccacccctggaagcctacaactgcattcgtcttgtcacctttctcttctttctttctttctctctttcctttcctttcttttcctttcctttcctttcctttcctttcctttcctttcctttcctttcctttcctttcctttcctttcctttcctcctttccctcttttttttcctttttttttt

SEQ ID NO: 19091 - DNA, 201 bp, Homo sapiens
ccttctcacagcttgccacccctggaagcctacaactgcattcgtcttgtcacctttctcttctttctttctttctctctttcctttcctttcttttcctttcctttcctttcctttcctttcctttcctttcctttcctttcctttcctttcctttcctttcctttcctcctttccctcttttttttccttttttttttg

SEQ ID NO: 19092 - DNA, 201 bp, Homo sapiens
ttctcacagcttgccacccctggaagcctacaactgcattcgtcttgtcacctttctcttctttctttctttctctctttcctttcctttcttttcctttcctttcctttcctttcctttcctttcctttcctttcctttcctttcctttcctttcctttcctttcctcctttccctcttttttttccttttttttttgag

SEQ ID NO: 19093 - DNA, 201 bp, Homo sapiens
tctcacagcttgccacccctggaagcctacaactgcattcgtcttgtcacctttctcttctttctttctttctctctttcctttcctttcttttcctttcctttcctttcctttcctttcctttcctttcctttcctttcctttcctttcctttcctttcctttcctcctttccctcttttttttccttttttttttgaga

SEQ ID NO: 19094 - DNA, 201 bp, Homo sapiens
ctcacagcttgccacccctggaagcctacaactgcattcgtcttgtcacctttctcttctttctttctttctctctttcctttcctttcttttcctttcctttcctttcctttcctttcctttcctttcctttcctttcctttcctttcctttcctttcctttcctcctttccctcttttttttccttttttttttgagac

SEQ ID NO: 19095 - DNA, 201 bp, Homo sapiens
ggcaggacgagaagcggagacccaagagaagagagattccattgaaagtcttggtcaagtgagtggcagtggcagtggctagtagtgatgtgtgaactatmtctctcccttctagtcagcctctgcctccagtccttgaagggcaagaacacaaggaatggttatgctttttgcttttgtttttgagacagggtcttactc

SEQ ID NO: 19096 - DNA, 201 bp, Homo sapiens
gccctcccttgtgggagttcagtgacaggggtggggcgcaggccagccttctctcccaggctcatgatgggtgtgaagggtcctctaccactccagcatcygcgagccgagccaagccaggaccccgccctgccctcacatctcctttcttttctgaaggtagaggcctggaaaacccatgtctggcaggacgagaagcgg

SEQ ID NO: 19097 - DNA, 201 bp, Homo sapiens
agtcaccatcctctttgcgacagagacaggaaaatcagaggcgctggcctgggacctgggggccttattcagctgtgccttcaaccccaaggtactggctyagtgggatggctgttgttttttctgcttgtgtgcaggggagtctaggaaaagttaaaacggtttccccactcctggatgtctcagagtcttggatgtggt

SEQ ID NO: 19098 - DNA, 201 bp, Homo sapiens
gactcacagcctttggacctcagcaaaggtacctgcttctctgcagcacatggggcttgtttgtgttggggtctgagccctaagcccatggtcaaggagamccccaggtctttctgaacagagacagctggcctcggggcctccctctcactgcatgcaagagcctgttagggcataatactcaaggtgctgagggaggct

SEQ ID NO: 19099 - DNA, 201 bp, Homo sapiens
gtagctttggctcagctctgctcatgcccttttggctctgcgggaggaagaagataagaggaagagggaagatggggatggggaggcagttggtcagaccraccatgaacaattcactcccaccctctggactcagtttccctatttgtcaaatgaggttactggcagagggaactccaagatgcccctccacccttggat

SEQ ID NO: 19100 - DNA, 201 bp, Homo sapiens
gtcaagtgagtggcagtggcagtggctagtagtgatgtgtgaactatatctctcccttctagtcagcctctgcctccagtccttgaagggcaagaacacarggaatggttatgctttttgcttttgtttttgagacagggtcttactctgtcacccaggctggggtgtagtggtgccatcacagctcactgcagcctctgc

SEQ ID NO: 19101 - DNA, 201 bp, Homo sapiens
agtgacctttttcaagtcacttttcctctccccgtctcagtttctgcttgggcagaaggagcaacttgcagcctctctaagtccctttcaacgttcctcasctccgcgcttacagagggtggatctcagaaccaggaggacaaacagctgctcattgagtcctgagagtgcctgagtgggggcgtccaaggaggccgtggt

SEQ ID NO: 19102 - DNA, 201 bp, Homo sapiens
cccccatctacacaagaccaccacatagccacacaaccccaccgccccagaggagcctttcccatggactacaaagggtagggcgccccctggatgtgtgragcatgacggccctgagtgtatctgtcagaggcggcaaaaaatgccagtggctaagaggatgggcttggggatgagcaagtggctttgccactcagtagc

SEQ ID NO: 19103 - DNA, 201 bp, Homo sapiens
caggtctatggggctataagttcttttctttctttccctctttccttcctttccttcctgtcctttcctcccttcccctcccttcccttccctttctttcttttttttttttggaaacagccttgactgcccagcctcaagcaatccttctgcctcagcctcccgagtagctgggactacaggcacaagacaccatgcctg

SEQ ID NO: 19104 - DNA, 201 bp, Homo sapiens
tccacagaaaggccattttgttcagagttacccactctccttaatcaggagttcattctttaaatagttttgatgctgtttcaaaaggctttggtgctgaytggaaatctcaaggttgttgttgttggtggtggtggtagtgtgtgtgtgtgtgtgtgtgtgtgtgtttcaaagcctttctgactgagtccctccctccct

SEQ ID NO: 19105 - DNA, 201 bp, Homo sapiens
acccactctccttaatcaggagttcattctttaaatagttttgatgctgtttcaaaaggctttggtgctgactggaaatctcaaggttgttgttgttggtggtggtggtagtgtgtgtgtgtgtgtgtgtgtgtgtgtttcaaagcctttctgactgagtccctccctccctttgggatatttttgaagtctgggagggga

SEQ ID NO: 19106 - DNA, 201 bp, Homo sapiens
gaacttgaaccccagctttctgacactggagtccttaattgctctgttgtgttgcattctcagcatttagcacagagcctggcacatacttgaagcttaayataggtttgcatgaatgaatgagtgcatgaatgcataatttaataaatggcatcctatgtgtccaatacgtctctctggctgggattaactcagaatcaa

SEQ ID NO: 19107 - DNA, 201 bp, Homo sapiens
ggtagttcacacctgtaattccagcactttgggaggctgaggcaggaggattacttgaggccagtagttcgagaccagcctgggcaacatagtgagactctataaaataataataataataataataataataataataaggaaaaaaattagctgagcaagatggcacatgcctgcagtcctagctacttgggaggctga

SEQ ID NO: 19108 - DNA, 201 bp, Homo sapiens
tcgcgcccttccgcagtttctggcagcaacggctccatgactcccagcacaagggtaaggctggaggcttcccaggtgggaggggcaccagggggccagcrcctgcctaggagcagaactgcagccccacaaacggttcctgacctctctcgagggaaggcctcccaagtttgcttccctgtgcgggcctctgcgggttag

SEQ ID NO: 19109 - DNA, 201 bp, Homo sapiens
gtagttcacacctgtaattccagcactttgggaggctgaggcaggaggattacttgaggccagtagttcgagaccagcctgggcaacatagtgagactctataaaataataataataataataataataataataataaggaaaaaaattagctgagcaagatggcacatgcctgcagtcctagctacttgggaggctgag

SEQ ID NO: 19110 - DNA, 201 bp, Homo sapiens
acctgtaattccagcactttgggaggctgaggcaggaggattacttgaggccagtagttcgagaccagcctgggcaacatagtgagactctataaaataataataataataataataataataataataaggaaaaaaattagctgagcaagatggcacatgcctgcagtcctagctacttgggaggctgaggcaggagga

SEQ ID NO: 19111 - DNA, 201 bp, Homo sapiens
ccctcagccccctagaagagctccaccttgtgcacacaactctgggggagaaggtggcacagatacccccctgcccttagggagcttctagtttaaggtckttcctccagtgactacctaggtcacctcttaactactgtgtctgtttcagtctcacagccatagagagcctggggacaggcaccacacaatggcggatcc

SEQ ID NO: 19112 - DNA, 201 bp, Homo sapiens
cagggtttgtcctggcaacaaggaaaggtttcttctgatatccatgtatgtccaaggcggatgctttctttaggcagaggctgtagccaagccctcggggrgctccaagggctgctgggaaggggtgggcccccctcctccccagagggaagctcctggggccctcttaagcacccctgcctgtggggatgcctcatccca

SEQ ID NO: 19113 - DNA, 201 bp, Homo sapiens
gtctcagctacaggtacgggactgaggcgggaggattgcttgagcccaggtggttggggcttcagtgagctatgatggcaccactgtactccagcctgggygactgagtgagaccctgtctcaaaacaaaaacaaagcaatatttataatagtagcaatagctactatgtgccaagcccagacacctctttgagtccttgc

SEQ ID NO: 19114 - DNA, 201 bp, Homo sapiens
gtatgttggccagtctggtctcaaactcctgacctccagtaatccacccaccgcggcctccaaaagtgctgggattacaggcatgagccaccatgcccggyctggaccaaggatctttatttgtggaataaaaggaagaaaaagaaaaacccaacggccacctcagcaggatgccccaagggtggtgttcagatgtcactg

SEQ ID NO: 19115 - DNA, 201 bp, Homo sapiens
gctgctagcctgtggccatgttggggtctgagccccagccttccagctgcgaaggcagccaagtgtcgtagagaaggtgtcacagaggcgattccaggctktagtggtgaactctccactctgcacccccaggtgctgtgccctgtgccctgtctaagatagtcctgaaggtttctgcatatttaagatatccccaatgtc

SEQ ID NO: 19116 - DNA, 201 bp, Homo sapiens
gccagagactgagtccggagtagggagaaaaacctgactcacacccactggggttcagccagtggaagagaggagatctaggtgggagaaagccaggtggwccccaaggaggaggtgccacaggggtggagaagaggtgcagggagccggagcagccagagaggagccaggtggccaggagagctggccccagaggagggt

SEQ ID NO: 19117 - DNA, 201 bp, Homo sapiens
cttcgatgcccgcagctgttccactgcccgggaaatgtttgaacacatctgcagacacgtgcgttactccaccaacaatggcaacatcaggtcggtgcacrtttcccagggctgcagaggggcttgccttgcctgagaatcttagccaaaagatgcagcacttgggtctaggggaggcatctccagctccaggagaaacca

SEQ ID NO: 19118 - DNA, 201 bp, Homo sapiens
ctttcctatgacatatttaatatatttctgtgaatggcctacctgtttgtatttacaaattcatatttaaaggaaacttgtatcactctcacaaatggaargcagcaaaacataaattcaatgaaaacaaaatgaagttaatgaattttagctagatactattccctggccaaggcctgctctttgtttgttttgtttgtt

SEQ ID NO: 19119 - DNA, 201 bp, Homo sapiens
accagccccgggctctgaggatctgacagtgggtggcgcagagccaggccttgcccttggggagctctccagcatacaccccaccctcccctcccagcgcyctgcaaagcaggcgtcaatgccattgttaatgcacagaggaggaacctgactgttagacaggttgatgggttttccagggtcgcacggcttctgggagat

SEQ ID NO: 19120 - DNA, 201 bp, Homo sapiens
ttataatagtagcaatagctactatgtgccaagcccagacacctctttgagtccttgctgtcaccctatcaggtaagtgtgcttcgaagttacacgaaacmcacggctcagtgtttggcccatggtaagggcctaaaaagtggtagccccagtggtggggatgctgctgctgctgaccattaaccgcagtctgctccacct

SEQ ID NO: 19121 - DNA, 201 bp, Homo sapiens; identical to SEQ ID NO: 4805

SEQ ID NO: 19122 - DNA, 201 bp, Homo sapiens
gcccagacacctctttgagtccttgctgtcaccctatcaggtaagtgtgcttcgaagttacacgaaacacacggctcagtgtttggcccatggtaagggcytaaaaagtggtagccccagtggtggggatgctgctgctgctgaccattaaccgcagtctgctccaccttcttccaggcagcctgtgagacgtttgatgtc

SEQ ID NO: 19123 - DNA, 201 bp, Homo sapiens
agggcctaaaaagtggtagccccagtggtggggatgctgctgctgctgaccattaaccgcagtctgctccaccttcttccaggcagcctgtgagacgtttsatgtccgaggcaaacagcacattcagatccccaagctctacacctccaatgtgacctgggacccgcaccactacaggctcgtgcaggactcacagccttt

SEQ ID NO: 19124 - DNA, 201 bp, Homo sapiens
ccatagagatggcctgtccttggaaatttctgttcaagaccaaattccaccagtatgcaatgaatggggaaaaagacatcaacaacaatgtggagaaagcyccctgtgccacctccaggtgagttttccctgggggaacctcctgcttgtctccttgggcacccatgccctgtcggcaccgatgactcagaattcctctct

SEQ ID NO: 19125 - DNA, 201 bp, Homo sapiens
aagggctggctttgcaccacacatcctgactcctggggactcccagcaccagccctgatgctggcaggatgtggatacgtcccagaaaatctgtgagcctytgctgtctcctcaccgtggctgactgtgtccttccactgcctgagcgtctccaggacttcctcaccaccctccttcagggtaaacttcaaaagatgggcc

SEQ ID NO: 19126 - DNA, 201 bp, Homo sapiens
tcctggtggaactctcctgtgaggatggccaaggcctgaactacctgccgggggagcaccttggggtttgcccaggcaaccagccggccctggtccaaggyatcctggagcgagtggtggatggccccacaccccaccagacagtgcgcctggaggccctggatgagagtggtgagtcccgggctagaaagccagtgctgc

SEQ ID NO: 19127 - DNA, 201 bp, Homo sapiens
cccctgtggggccgccgacccctgggagttccgggaggaaagggagggatctggggtttaggagacgctcggagccccttggcccataaagaaggcactgrggtcacactggtgtggctgcctgtagcagggacagcgatgacaggtgggtctcaagagtccagtgagcttggccctttttcagaaggacctgggggaggt

SEQ ID NO: 19128 - DNA, 201 bp, Homo sapiens
tgcccccctgctcactcagccaggccctcacctacttcctggacatcaccacacccccacccagctgctgctccaaaagctggcccaggtggccacagaaragcctgagagacgaggctggaggccctgtgccaggtgaagatcagggctggtgggcagtgggggtatgtggggggtcccagcatgtggggagccagagtc

SEQ ID NO: 19129 - DNA, 201 bp, Homo sapiens
cggagccccttggcccataaagaaggcactggggtcacactggtgtggctgcctgtagcagggacagcgatgacaggtgggtctcaagagtccagtgagcwtggccctttttcagaaggacctgggggaggtgctggtgcctggacagaagtgaagcagcctgcaggacgtgggaaatcaaataggagcttcttgtcctct

SEQ ID NO: 19130 - DNA, 201 bp, Homo sapiens
cgtgtttcaccaggagatgctgaactacgtcctgtcccctttctactactatcaggttaggggccttcctcttctctccttcctgggggctcagatgtggytgtatgtgtgtgtgtgtgtgtgcacctcattgttacacatgtagggcacgacgggaagcaggagtatgttgttagagctttccaggccccactcaaggat

SEQ ID NO: 19131 - DNA, 201 bp, Homo sapiens
ccgctggcccatgtctaggacacagttgtgttgagtgaactgaatttttccaagtgtctgcaggatgcaaccagagtgcactgccttgaacattagctagraaggggagccgcccttatccgtctttgctttccccaaaactggaataaacttgtcacttaagatgtattgggggatggatgatgtggatgaatggataaa

SEQ ID NO: 19132 - DNA, 201 bp, Homo sapiens
aactaacttgcacccctctcacaagtctcccttcctctcaggagctgctcccgaaattcgccaactcaccctgggcctctgtctggcgttgtatcctctcytctgcccttccccagcacctttgcctgcctccatcagagtttctatcaggccgtgtgaaaatgactgattttccttggcttccccacccagttagactag

SEQ ID NO: 19133 - DNA, 201 bp, Homo sapiens
tcgtctcagcaccatggacagtgcctggcacatggacttgtttgttgagtgagtgaatgaatgaatgaatactgggttgtgacagtcttttccccaaagcrggacaggcgccctgagtcactgacatcacccttggcttttagccctcagagtacagcaagtggaagttcaccaacagccccacattcctggaggtgctag

SEQ ID NO: 19134 - DNA, 201 bp, Homo sapiens
caaagcgggacaggcgccctgagtcactgacatcacccttggcttttagccctcagagtacagcaagtggaagttcaccaacagccccacattcctggagytgctagaggagttcccgtccctgcgggtgtctgctggcttcctgctttcccagctccccattctgaagcccaggttctactccatcagctcctcccggga

SEQ ID NO: 19135 - DNA, 201 bp, Homo sapiens
ccacacatcctgactcctggggactcccagcaccagccctgatgctggcaggatgtggatacgtcccagaaaatctgtgagcctctgctgtctcctcaccrtggctgactgtgtccttccactgcctgagcgtctccaggacttcctcaccaccctccttcagggtaaacttcaaaagatgggcccttgtttcctcctctg

SEQ ID NO: 19136 - DNA, 201 bp, Homo sapiens
atctgttcatcaactcagattcagctccctcatcagttcaaggagggagggaacacccacagcccagagttgttaacagtattaggaggtgtgtgggagasatctctaggaaccaggcactaaaccaagccttctgtatgtatatgatcagttacattgtggggtaggcactgtgtgcattttacaggtggcacagaaagt

SEQ ID NO: 19137 - DNA, 201 bp, Homo sapiens
aatttttatatttttagtagagatggtgtttttccatgttgcccaggttggttccgaactcctggcctcaagtgatccgcttgcctcagcctcccaaagcrctgggattataggcataagccacggtgccgggccagctttctttattgtttggtttcctccactagaatgtaagctccatggggcagggaccttgtctgt

SEQ ID NO: 19138 - DNA, 201 bp, Homo sapiens
tggccaacatgctgcttgaggtgggcggcctggagttcccagggtgccccttcaatggctggtacatgggcacagagatcggagtccgggacttctgtgaygtccagcgctacaacatcctggaggtaacccagccagcccagctggccagatgaaggtgtgggcctgggggtggcttcagggaccgactcgccgctatca

SEQ ID NO: 19139 - DNA, 201 bp, Homo sapiens
atgataacatccccctcaatgcagtggccaaagtcagaaagtgggatgagctgggtgtggtggctcacgcctgtaatctcagcactttgggaggccgtggygggtggatcacttgaggtcaggagtctgagacaatcctggccaacatggcaaaaccccgtctctactaaaaatacaaaaataattagacaggaatggtgg

SEQ ID NO: 19140 - DNA, 201 bp, Homo sapiens
cctctgcgtattgagatttactctgtagcagacattgggctgggctcttcttcctggccgttgaatgaaccaaattcagtcctgactcacagcctttgtaytccctgttccctttgcatgacatgccttttcctcagaatttttctaggctcatttcttcttgtcaaaaggtatttcctataatgtcacctcctctgagaa

SEQ ID NO: 19141 - DNA, 201 bp, Homo sapiens
agattctagaaaggagcagcccaggcctcttctgccctcctgccaatgctcttagctgtccctctcctgtcgggatcatatagggctgcagtgacttcaaragtcctactggcccagcccctgctctaggcagttctcataattgcaaaaatacctctgcgtattgagatttactctgtagcagacattgggctgggctct

SEQ ID NO: 19142 - DNA, 201 bp, Homo sapiens
gttgaactcactttttgtctgcgccccctgggcctgggtgggaaacagacagactgggagaatggcaccgtggagaaggcaggctgaacagggactgtgcrggggttctgttaaaacaaaaggcaccgggcagtgaggagaagcattaatagagccaaggagaagccgaaaggcagaggcaagggcaagagggagagacca

SEQ ID NO: 19143 - DNA, 201 bp, Homo sapiens
ttacccactctccttaatcaggagttcattctttaaatagttttgatgctgtttcaaaaggctttggtgctgactggaaatctcaaggttgttgttgttgktggtggtggtagtgtgtgtgtgtgtgtgtgtgtgtgtgtttcaaagcctttctgactgagtccctccctccctttgggatatttttgaagtctgggaggg

SEQ ID NO: 19144 - DNA, 201 bp, Homo sapiens
cccactctccttaatcaggagttcattctttaaatagttttgatgctgtttcaaaaggctttggtgctgactggaaatctcaaggttgttgttgttggtgktggtggtagtgtgtgtgtgtgtgtgtgtgtgtgtgtttcaaagcctttctgactgagtccctccctccctttgggatatttttgaagtctgggaggggag

SEQ ID NO: 19145 - DNA, 201 bp, Homo sapiens
ccttaatcaggagttcattctttaaatagttttgatgctgtttcaaaaggctttggtgctgactggaaatctcaaggttgttgttgttggtggtggtggtrgtgtgtgtgtgtgtgtgtgtgtgtgtgtttcaaagcctttctgactgagtccctccctccctttgggatatttttgaagtctgggaggggaggagagaag

SEQ ID NO: 19146 - DNA, 201 bp, Homo sapiens
acacaagttgctacagtttagttggagtgagagacaagctaaacttgtcagctgacaaccaggtccttggccaggtagccccatatgtaaaccaacttccrtggtgggctgtgagccttctcctgcaagctgtggccaggtttccagaagaaaggaaaaaacagtgtttttattcatcctggcttgagaactctgtcattc

SEQ ID NO: 19147 - DNA, 201 bp, Homo sapiens
cccaagctctacacctccaatgtgacctgggacccgcaccactacaggctcgtgcaggactcacagcctttggacctcagcaaaggtacctgcttctctgyagcacatggggcttgtttgtgttggggtctgagccctaagcccatggtcaaggagacccccaggtctttctgaacagagacagctggcctcggggcctcc

SEQ ID NO: 19148 - DNA, 201 bp, Homo sapiens
ttcatcaactcagattcagctccctcatcagttcaaggagggagggaacacccacagcccagagttgttaacagtattaggaggtgtgtgggagagatctstaggaaccaggcactaaaccaagccttctgtatgtatatgatcagttacattgtggggtaggcactgtgtgcattttacaggtggcacagaaagtcacac

SEQ ID NO: 19149 - DNA, 201 bp, Homo sapiens
agtcctccaccactccactgtcccactactcttgggacaatttaatgagatcagatgtgaagagcactcaacccttggtaggaggccagtggttcttagtsttcccaatcatgcagcctgaacgcaggggagattctgcattgattattcattcactcactcagctattcagtgggtgcctggcactggggtgggtatgga

SEQ ID NO: 19150 - DNA, 201 bp, Homo sapiens
ggccacccatagatccttccccactctaagacaaggcagggcctggggtctaggagagacctgagagaaaaccctgttttttccccttgcagaagtctccrgaatctctggtcaagctggatgcaaccccattgtcctccccacggcatgtgaggatcaaaaactggggcagcgggatgactttccaagacacacttcacc

SEQ ID NO: 19151 - DNA, 201 bp, Homo sapiens
acaatttaatgagatcagatgtgaagagcactcaacccttggtaggaggccagtggttcttagtcttcccaatcatgcagcctgaacgcaggggagattcygcattgattattcattcactcactcagctattcagtgggtgcctggcactggggtgggtatggaaatacaacagagatcagccctgccctcagggagcat

SEQ ID NO: 19152 - DNA, 201 bp, Homo sapiens
tagtcttcccaatcatgcagcctgaacgcaggggagattctgcattgattattcattcactcactcagctattcagtgggtgcctggcactggggtgggtrtggaaatacaacagagatcagccctgccctcagggagcatctagaggcggcagtggagagataggcatagaaataattagatgattttcattgtgctgaa

SEQ ID NO: 19153 - DNA, 201 bp, Homo sapiens
cacctgggggcctctcagctcaccccgatgggagaaggggatgagctcagtgggcaggaggacgccttccgcagctgggccgtgcaaaccttcaaggtcakttcccagccagagctgccccacagcagggacatgacagggtgcattcatgcctaggacatctgtgctgggcgtcccaggtggcatgacctctgcctgtgg

SEQ ID NO: 19154 - DNA, 201 bp, Homo sapiens
ccccaaagccagccctggagggagctgtctctggtgagaggcatcttgcccttctgatgtcctatttcagttcctgcttctgtggattgaattaatccccrtgtaaggccatctcattgttgatcttcctgctgtcttcctgtcccccagggcaaaaatagaggaacatctggccagggtggaagcggtaacaaaggagat

SEQ ID NO: 19155 - DNA, 201 bp, Homo sapiens
tattcattcactcactcagctattcagtgggtgcctggcactggggtgggtatggaaatacaacagagatcagccctgccctcagggagcatctagaggcrgcagtggagagataggcatagaaataattagatgattttcattgtgctgaagccaagaaggaaaggtcagggtcactgagggaagcagagcagggggtga

SEQ ID NO: 19156 - DNA, 201 bp, Homo sapiens
agctcatccgctatgctggctaccagatgccagatggcagcatcagaggggaccctgccaacgtggaattcactcaggtacccggcccagcctcagccgcyggccattggggcggggagccccgtggtgagcgagtgacagagtggagcccagaggagacacgcagcccgggcttacagactcacagggcccgtcttgttc

SEQ ID NO: 19157 - DNA, 201 bp, Homo sapiens
cactggggtgggtatggaaatacaacagagatcagccctgccctcagggagcatctagaggcggcagtggagagataggcatagaaataattagatgattytcattgtgctgaagccaagaaggaaaggtcagggtcactgagggaagcagagcagggggtgacgctgccatagagcgggaggccaacatctcgtccaggt

SEQ ID NO: 19158 - DNA, 201 bp, Homo sapiens
tgccatagagcgggaggccaacatctcgtccaggtggtctcggctccaccactggccgctgccccctgccctgccctctgtaactgagcattgcctgggtkggcaaagctgggagctgcccacacttccgagccctctgtcctcaagaagcaaaaacacagtttctaaaaccttggcagagactctatttgccctgctaga

SEQ ID NO: 19159 - DNA, 201 bp, Homo sapiens
atctcgtccaggtggtctcggctccaccactggccgctgccccctgccctgccctctgtaactgagcattgcctgggttggcaaagctgggagctgcccayacttccgagccctctgtcctcaagaagcaaaaacacagtttctaaaaccttggcagagactctatttgccctgctagagaacagccacccagaccaggag

SEQ ID NO: 19160 - DNA, 201 bp, Homo sapiens
gccacccagaccaggagaggagaggcagacgtgtcctgtgagatcaaagtttaatcccgaggaaaaccagggggacctctgcagttggttggaggccttcytcaagtgctgggccattgtaaagggaacacaacccagagagacctcctgggtttctacaagcccaggagggcccactgaggaggaaagcaaggtgccaga

SEQ ID NO: 19161 - DNA, 201 bp, Homo sapiens
acttctgatcagcctcaaagcctctgtctacccagtctttgatgggcatggtctggatgggctgttgcaggtcttcgatgcccgcagctgttccactgccygggaaatgtttgaacacatctgcagacacgtgcgttactccaccaacaatggcaacatcaggtcggtgcacgtttcccagggctgcagaggggcttgcct

SEQ ID NO: 19162 - DNA, 201 bp, Homo sapiens
gtgggcaggccctcaacatctttgggcttactgtccccgtagggtggaagatggaaggtcacgttgctgacagttaagaacctgggcttggcatcagggcracctgggtctgagtcctgactttgctctttcctgtacttatgttcctgggcctggtgcttaacctcctagagccttgagatccttggctataaaatagat

SEQ ID NO: 19163 - DNA, 201 bp, Homo sapiens
gctcagctatctttgtttttaaaaaagactaataggcaatgagagaggtattaaaggtctattagcaccaatatgagactgtctctccagtgctccgaagratgaaaatgtaattgaaggggaataactaaaaaataaattatgaaaagggagtaaatactcaccatgggatttgacgctagttctgctgggtcacatacc

SEQ ID NO: 19164 - DNA, 201 bp, Homo sapiens
agctgtggccaggtttccagaagaaaggaaaaaacagtgtttttattcatcctggcttgagaactctgtcattccctctctttctagaaactgaagaaatygctcttcatgctgaaagagctcaacaacaaattcaggtaaagctttttccgttgtcctactcctagccctgccctgtggacccaaagtctgggttcaggg

SEQ ID NO: 19165 - DNA, 201 bp, Homo sapiens; identical to SEQ ID NO: 4820

SEQ ID NO: 19166 - DNA, 201 bp, Homo sapiens
acaacaaattcaggtaaagctttttccgttgtcctactcctagccctgccctgtggacccaaagtctgggttcaggggatggaactgggtgtgcacagggkgtcttctcagaaccgtgcaggcacagagacctgggtctaaggtctgtactcagaatgtgtcgagggtcaaaccacagaaaccaagtccctctcacaggtc

SEQ ID NO: 19167 - DNA, 201 bp, Homo sapiens
gtcacgttgctgacagttaagaacctgggcttggcatcagggcgacctgggtctgagtcctgactttgctctttcctgtacttatgttcctgggcctggtrcttaacctcctagagccttgagatccttggctataaaatagatgcaaaaatacctccctcccagactcagtgagaccctgcctgtgggttgcttcaccca

SEQ ID NO: 19168 - DNA, 201 bp, Homo sapiens
ttactgttgtcatgctcaggtgcagaggggggaatattgctggaagctttgtttggggagggaggtctcccagcagtggggtggttcccacctcacccagyagctccttatggcaggggtgtccttggggataaatatcatcagtgttttgtctttgtgctttttttctctaatcaaggaaaagttgtcgagacactcttc

SEQ ID NO: 19169 - DNA, 201 bp, Homo sapiens
acctctttgagtccttgctgtcaccctatcaggtaagtgtgcttcgaagttacacgaaacacacggctcagtgtttggcccatggtaagggcctaaaaagkggtagccccagtggtggggatgctgctgctgctgaccattaaccgcagtctgctccaccttcttccaggcagcctgtgagacgtttgatgtccgaggcaa

SEQ ID NO: 19170 - DNA, 201 bp, Homo sapiens
gcttggtggtgttggaacccatttgcttctcccagaggaaaattgtatttttccaagtcacaagtacataccttgaacccctgcttccctgagcaagagawcctgggggtgtgaacggggaatggcagcctctcctcacagggaccctggcaatctaagacatgaccagctgagcaggttcagtggccttttgtatctgaa

SEQ ID NO: 19171 - DNA, 201 bp, Homo sapiens
aaattcgccaactcaccctgggcctctgtctggcgttgtatcctctcttctgcccttccccagcacctttgcctgcctccatcagagtttctatcaggccrtgtgaaaatgactgattttccttggcttccccacccagttagactagactctaatgcagagaaagggctgtgtctttcccttctataacgccgatgcctt

SEQ ID NO: 19172 - DNA, 201 bp, Homo sapiens
gggtgaaggagcattttccagatcctctatgggctgctgtttgggccagtagctttggctcagctctgctcatgcccttttggctctgcgggaggaagaakataagaggaagagggaagatggggatggggaggcagttggtcagaccgaccatgaacaattcactcccaccctctggactcagtttccctatttgtcaaa

SEQ ID NO: 19173 - DNA, 201 bp, Homo sapiens
tctgtaatagaaatgtagaataagtaaataaaccaagataaatcacgtgttttaaataaagcttaagtcatgaaaaacaagtggctggggctgggcgcggyggctcctgcctgtaatcccagcactttgggaggctaaggtgggaggatcacttgaggccaggagtttgaggccagcctgggcaacatggtgaaaccccat

SEQ ID NO: 19174 - DNA, 201 bp, Homo sapiens
cccgcgcagagccaggtaccccgcgggccgaagtccgccctgggagggaagcggtgggctccgagcccgggcggggccccatctctctctgggagaaatcsgagggcggggatgtgcgctctgtgggattcctgagggtttactaaaagcgttttcctcttttagaacgcttgagaggtcgcaattcaggagcccaggcgg

SEQ ID NO: 19175 - DNA, 201 bp, Homo sapiens
ccgcgagccgagccaagccaggaccccgccctgccctcacatctcctttcttttctgaaggtagaggcctggaaaacccatgtctggcaggacgagaagcrgagacccaagagaagagagattccattgaaagtcttggtcaagtgagtggcagtggcagtggctagtagtgatgtgtgaactatatctctcccttctagt

SEQ ID NO: 19176 - DNA, 201 bp, Homo sapiens
tatgctggcattagcagccacactgtcggtaggaccggcccacctggtaacctgcggccacctgtgcttttacgtctactcttggttaaccacgagccacktttccagcttggactctaagcatctgctccacttcctctccttcctcattgaactctttcactaaaaggagagtgcaagagagacttaaactgtttgatt

SEQ ID NO: 19177 - DNA, 201 bp, Homo sapiens
cagatgccagatggcagcatcagaggggaccctgccaacgtggaattcactcaggtacccggcccagcctcagccgccggccattggggcggggagccccrtggtgagcgagtgacagagtggagcccagaggagacacgcagcccgggcttacagactcacagggcccgtcttgttccccagctgtgcatcgacctgggc

SEQ ID NO: 19178 - DNA, 201 bp, Homo sapiens
ttccccagctgtgcatcgacctgggctggaagcccaagtacggccgcttcgatgtggtccccctggtcctgcaggccaatggccgtgaccctgagctcttygaaatcccacctgaccttgtgcttgaggtggccatggaacatcccaagtaagtaggctgagggtgctgggggcaagggcgagtcaacacacagcccttct

SEQ ID NO: 19179 - DNA, 201 bp, Homo sapiens
gctggagggcggccgatgcttccaccacggccatcagaggggctcttctgtccccagggccgcgttaccccctgagcctggggtgtcagaatagactctcrgccttcacacatttgtcccatcagggcacctcttgggcccagtgctctgtgcccagtgctggggccactgggcatcctgtgtggagcaggagcagagagt

SEQ ID NO: 19180 - DNA, 201 bp, Homo sapiens
ggagcaagtgggaatttatagccaaggatcagggtggggtctgtggatggaaaattaccaagaaaaacttcaggcatagggggaattctgcctcacccaayctaacaggattcttgcttaggacaggctaaggtgatcagacatcgcctgggggaggatggaggatgaggaccctgatcagatggggaggacgacaagcta

SEQ ID NO: 19181 - DNA, 201 bp, Homo sapiens
atggagatgtcccgggactttccatttttaggttcctaaattgaatttcccaacacctagaagcaacacttagaagctgccctgtatcagatcaaggagcttttttttttttttttttttttttgagacggagtctcggtctgtcgtccaggctggagtgcagtggcgcgattcccgcttactgcaacctccgtctcctgg

SEQ ID NO: 19182 - DNA, 201 bp, Homo sapiens
tcagctcatccgctatgctggctaccagatgccagatggcagcatcagaggggaccctgccaacgtggaattcactcaggtacccggcccagcctcagccrccggccattggggcggggagccccgtggtgagcgagtgacagagtggagcccagaggagacacgcagcccgggcttacagactcacagggcccgtcttgt

SEQ ID NO: 19183 - DNA, 201 bp, Homo sapiens
cacactgtcggtaggaccggcccacctggtaacctgcggccacctgtgcttttacgtctactcttggttaaccacgagccacttttccagcttggactctragcatctgctccacttcctctccttcctcattgaactctttcactaaaaggagagtgcaagagagacttaaactgtttgattcattcttaagaactttca

SEQ ID NO: 19184 - DNA, 201 bp, Homo sapiens
agcacacactgttccccatgactgggtcaccccataggcagatcaggcctgtgcttgacgggggaggggaagatggaacaggaagagccccccggtgtttsgggaagggctggctttgcaccacacatcctgactcctggggactcccagcaccagccctgatgctggcaggatgtggatacgtcccagaaaatctgtgag

SEQ ID NO: 19185 - DNA, 201 bp, Homo sapiens
ctcacgaccgcctcccacaggcccagctccccagccatcctgtgtgtgcgtgggcctggggtgtctgaggactggccccctcttctcctgtcctcttcagygccagcggcttccacctccccgaggatccctcccatccttgcatcctcatcgggcctggcacaggcatcgcgcccttccgcagtttctggcagcaacggc

SEQ ID NO: 19186 - DNA, 201 bp, Homo sapiens
ggcccataaagaaggcactggggtcacactggtgtggctgcctgtagcagggacagcgatgacaggtgggtctcaagagtccagtgagcttggcccttttwcagaaggacctgggggaggtgctggtgcctggacagaagtgaagcagcctgcaggacgtgggaaatcaaataggagcttcttgtcctctccaccccctca

SEQ ID NO: 19187 - DNA, 201 bp, Homo sapiens
cttgtgggagttcagtgacaggggtggggcgcaggccagccttctctcccaggctcatgatgggtgtgaagggtcctctaccactccagcatccgcgagcygagccaagccaggaccccgccctgccctcacatctcctttcttttctgaaggtagaggcctggaaaacccatgtctggcaggacgagaagcggagaccca

SEQ ID NO: 19188 - DNA, 201 bp, Homo sapiens
tgtgtgtgcgtgggcctggggtgtctgaggactggccccctcttctcctgtcctcttcagtgccagcggcttccacctccccgaggatccctcccatcctygcatcctcatcgggcctggcacaggcatcgcgcccttccgcagtttctggcagcaacggctccatgactcccagcacaagggtaaggctggaggcttccc

SEQ ID NO: 19189 - DNA, 201 bp, Homo sapiens
tccgattggctgagggaattctgcatccgcactttcagttctgtgactatggatgagtgatctgaatgcgctgggcctcagtttcctcatctgtaaagtgrggataatgctattaaatagctagtgggagtgaagtgagaattccagttgggcttggagccctggcgccctctggtggccaacatggtaacaacagcccgg

SEQ ID NO: 19190 - DNA, 201 bp, Homo sapiens
tggcaggtagacccaggggaatcaggcccagaaaggttctggaccccaagagaatcttagcagtggctgagatctgagctgggtgggctgtcagatggccytactgcacatcctggaccagttggcagctttgagaagtcgggtgaatgtgttccatttttccatctgtagaatgggggcaggagagtctccctggcctct

SEQ ID NO: 19191 - DNA, 201 bp, Homo sapiens
ggaggagttggggggaggaggtgggtccacccagagtgcaacatccactcaggtgagggaggggtgatgttactggaagaggaagcagccgtgcaaagggratttcatcctgaaagcaatgagagccaatgaatatattttgattttaaaaagtaattttctaatctgttcaggtgtcatgaaaccaagagcctattctaa

SEQ ID NO: 19192 - DNA, 201 bp, Homo sapiens
agcaggaaacagcccagggaacgctggggagtgtaattttaaatagggtggccagggaaggcagagctggaaggtggcatctgagaataaacctgagatgrtgaggaggagccctgtggatactgaaggaaacactctgggctgttctggaggggcagcaggtacaaaggccccgggggtgggagttaagctggcgtgttt

SEQ ID NO: 19193 - DNA, 201 bp, Homo sapiens
ggcggaaaggatccagtcagatagaagaggggatgaagaaaaaaatatcacacatcaattcattcaactctcccaacgatccacaaggaaggaattttagytatcccattttaaagatgaggaccctgaagcccagaaagttaaagtaattttcaagatctcataattagcaaatgacagagctgggattcagatccaggc

SEQ ID NO: 19194 - DNA, 201 bp, Homo sapiens
agtatcttgggtgggggatgaacgctgggcaggaaatgggtatgctaagtaaagctttggagatggttagagggcccgcaccagagcaggtgctgagcagsgttagggtctaaaccagattcaagcacaatctaagtataacagttgggaagacagatggctcatgaaggtccatgtgatagggaagctgggcaaccccag

SEQ ID NO: 19195 - DNA, 201 bp, Homo sapiens
gcccccatctacacaagaccaccacatagccacacaaccccaccgccccagaggagcctttcccatggactacaaagggtagggcgccccctggatgtgtrcagcatgacggccctgagtgtatctgtcagaggcggcaaaaaatgccagtggctaagaggatgggcttggggatgagcaagtggctttgccactcagtag

SEQ ID NO: 19196 - DNA, 201 bp, Homo sapiens; identical to SEQ ID NO: 4821

SEQ ID NO: 19197 - DNA, 201 bp, Homo sapiens
cagttaatgaacaagtcaagggacaggcttgaggctcgctcaggtggaaagacaaagcaatctgcaataacgcaatagtgcaactgaaaccaaagcccccrtctacacaagaccaccacatagccacacaaccccaccgccccagaggagcctttcccatggactacaaagggtagggcgccccctggatgtgtgcagcat

SEQ ID NO: 19198 - DNA, 201 bp, Homo sapiens
cacataataaaagaggagcaagtaataatgctgagttagaacaacaactgcaaaatctttaaaagaaaggtagctacagcttgagtgctttccccagtaayagacctaaaactacagttgataatgagagctgctgggaagtgtctttcagggtcaggcaaaggcacccctgtttcaacgacctccgggctcttcctcacc

SEQ ID NO: 19199 - DNA, 201 bp, Homo sapiens
aagccagtgctgcctggcaccctctggccgccccacctggctgaggggctgagcctgggcctgccggtgacagccatccctgtccttcctgctgagagggygggccaccaaagcttatgtgaaagcagctgtggaaacagtcccagcccataaggcatggccccctggccttagtttccctaatgataacatccccctcaa

SEQ ID NO: 19200 - DNA, 201 bp, Homo sapiens
tcccgtccctgcgggtgtctgctggcttcctgctttcccagctccccattctgaagcccaggttctactccatcagctcctcccgggatcacacgcccacrgagatccacctgactgtggccgtggtcacctaccacacccgaggtgagccaggggcagaggctctggaacagccccgctccgcccattattggacatctg

SEQ ID NO: 19201 - DNA, 201 bp, Homo sapiens
cccttcgcttttcattttgcaaggctagtggatacccccgaagtggcccttcacccccagcctgcccaccacaaacagaacctccgccctccctgagaaaycacttacataggtggggtgggggtacatcataggtgggttggcgggagtctgctgaaaagaaaccaggaaattcaatgggagagcgcatgtgtgcgcgag

SEQ ID NO: 19202 - DNA, 201 bp, Homo sapiens
ttgcaggtcttcgatgcccgcagctgttccactgcccgggaaatgtttgaacacatctgcagacacgtgcgttactccaccaacaatggcaacatcaggtyggtgcacgtttcccagggctgcagaggggcttgccttgcctgagaatcttagccaaaagatgcagcacttgggtctaggggaggcatctccagctccagg

SEQ ID NO: 19203 - DNA, 201 bp, Homo sapiens
ctcctccatgtggctccacaccaggaacataagagcaatcagacctcttccagtgtgggcatgaggatacaacaagatcatgtcaatattggcattcatartggtcgggcacagtggagcatgcctgcaatccaagcactttaggaggctgaggtgggcagattgcttgagcccaggagcttgaaactagcctgagtaaca

SEQ ID NO: 19204 - DNA, 201 bp, Homo sapiens
gagtggcctgctggctggggccagcctctcagaccctcggtccttcctactgtctgctcggccacccagggcctctgtgttgaactcactttttgtctgcrccccctgggcctgggtgggaaacagacagactgggagaatggcaccgtggagaaggcaggctgaacagggactgtgcgggggttctgttaaaacaaaagg

SEQ ID NO: 19205 - DNA, 201 bp, Homo sapiens
tggctgtgggccaggaggtgtttgggctgcttcctgggctcatgctgtatgccacgctctggctacgtgagcacaaccgtgtgtgtgacctgctgaaggcygagcaccccacctggggcgatgagcagcttttccagacgacccgcctcatcctcataggtgaggactccagacctgccctgccctggaaggtcattccct

SEQ ID NO: 19206 - DNA, 201 bp, Homo sapiens
ttggcacgcgtatgtcatcgacagtgggccggcaccctggtgacctgagggaacccctctctgtccacaggtagacctcggccacatttatggagacaatmtggagcgtcagtatcaactgcggctctttaaggatgggaaactcaagtaccaggtagtgctgggccagggggtagggcagagggaggggtctcccatggt

SEQ ID NO: 19207 - DNA, 201 bp, Homo sapiens
tccacaggtagacctcggccacatttatggagacaatctggagcgtcagtatcaactgcggctctttaaggatgggaaactcaagtaccaggtagtgctgrgccagggggtagggcagagggaggggtctcccatggtcttccctggcaaagactgcttggggcgggggtctgggtcatgtcctgagagggccaaccacgg

SEQ ID NO: 19208 - DNA, 201 bp, Homo sapiens
tcctgctcaggaggaagttcatacctgacccccaaggcaccaacctcatgtttgccttctttgcacaacacttcacccaccagttcttcaaaacttctggmaagatgggtcctggcttcaccaaggccttgggccatggggtgagtacctaggaggggctcaggactgctctggacctaatttggcacgcgtatgtcatcg

SEQ ID NO: 19209 - DNA, 201 bp, Homo sapiens
acctggctccggaattcactgcggcccagcccctctttcacccacttcctgctcactcacgggcgctggttctgggagtttgtcaatgccaccttcatccragagatgctcatgcgcctggtactcacaggtgggtgtggggcagggccccctgacctgggggagcaagcaagcctgctagtccttttggattcttggcat

SEQ ID NO: 19210 - DNA, 201 bp, Homo sapiens
gtctcagcctcccgagtagctgggattacaggtgcccgccaccatgcctggctaatttttgtatttttagtagagacagggttttgccatgttggccaggmtgatcttgaactgctgacctcaggtgatccacccgccttggcatcccaaagttctgggtttataggcatgagccacagcgcctggccgcactgatattat

SEQ ID NO: 19211 - DNA, 201 bp, Homo sapiens
gtagggcagagggaggggtctcccatggtcttccctggcaaagactgcttggggcgggggtctgggtcatgtcctgagagggccaaccacgggagtgggargcttgtgccaggagcgacagtatacgctgggaggaggcagcaggtatgagaagccagggaggagcagacgtggcctcccatgtcagccagggaggtggat

SEQ ID NO: 19212 - DNA, 201 bp, Homo sapiens
gcttcggccttgaccgctaccagtgtgactgcacccgcacgggctattccggccccaactgcaccatccgtgagctgggccttcagccctcactccttccrtcttgagcccttctgctccccgggccctttctcctagaccctaacttcctaccctcctctctgaccatggccctgttctccttccttgcctggttctgcc

SEQ ID NO: 19213 - DNA, 201 bp, Homo sapiens
cccaaacccttggaaaggtcctggaaccaggcagttctggacagtcctcatctgtggggatggggactagcagcttggcctttgggctgcgtgtgtctggyatgcagcgtggtgtgctgatcatctctgcctccgcgtgtcttggggactcagtgagagcaaatgggaaggttctctgctgatggggcagttgtgggaggg

SEQ ID NO: 19214 - DNA, 201 bp, Homo sapiens
aggtgggtggatcaattgagcccaggaggtcgaggctgtagtgagccataattgcggcactgcactctggcctgggcaatagagtgagaccctgtctcaaaaataaataaataaataaataaataaataaataaataaataaataggttggcaaactacagcctgcaggccaaattcggcccacctctccatttttgtaaa

SEQ ID NO: 19215 - DNA, 201 bp, Homo sapiens
ggtgggtggatcaattgagcccaggaggtcgaggctgtagtgagccataattgcggcactgcactctggcctgggcaatagagtgagaccctgtctcaaaaataaataaataaataaataaataaataaataaataaataaataggttggcaaactacagcctgcaggccaaattcggcccacctctccatttttgtaaat

SEQ ID NO: 19216 - DNA, 201 bp, Homo sapiens
gtgcagagactggcctgtctggggataggagtggaaatagggagcccacttagggaaaggagtcagagtggaagatgagcgggggttgcttgaggtagtgrtggtagagatggagagcaggggactgattttaagagacattttggaggtggaatcaacagccttggctgaggggaactggcagctggaggcaggagtggg

SEQ ID NO: 19217 - DNA, 201 bp, Homo sapiens
gtgggtggatcaattgagcccaggaggtcgaggctgtagtgagccataattgcggcactgcactctggcctgggcaatagagtgagaccctgtctcaaaaataaataaataaataaataaataaataaataaataaataaataggttggcaaactacagcctgcaggccaaattcggcccacctctccatttttgtaaata

SEQ ID NO: 19218 - DNA, 201 bp, Homo sapiens
tgggtggatcaattgagcccaggaggtcgaggctgtagtgagccataattgcggcactgcactctggcctgggcaatagagtgagaccctgtctcaaaaataaataaataaataaataaataaataaataaataaataaataggttggcaaactacagcctgcaggccaaattcggcccacctctccatttttgtaaataa

SEQ ID NO: 19219 - DNA, 201 bp, Homo sapiens
gggtggatcaattgagcccaggaggtcgaggctgtagtgagccataattgcggcactgcactctggcctgggcaatagagtgagaccctgtctcaaaaatwaataaataaataaataaataaataaataaataaataaataggttggcaaactacagcctgcaggccaaattcggcccacctctccatttttgtaaataaa

SEQ ID NO: 19220 - DNA, 201 bp, Homo sapiens
ctttcttttttgcccaattatagttgttgatcaaaatgactatctcttaagcatgaacgttattatttcatcctaagcaccagagctttcttttctttcctttttttttttttttttttgagatacaatcttgctctcttgcctgggctggagtgcagtggtgtgattttggctcactgtaacctctatctcctgggttca

SEQ ID NO: 19221 - DNA, 201 bp, Homo sapiens
ccagagctttcttttctttcctttttttttttttttttttgagatacaatcttgctctcttgcctgggctggagtgcagtggtgtgattttggctcactgyaacctctatctcctgggttcaagtgattcacctgcctcagtctcccaaatagctgggattactggcacctgccaccacgcccagctaatttttgtatttt

SEQ ID NO: 19222 - DNA, 201 bp, Homo sapiens
aggaacttacccaggctccaggacagcctggcctggctcccagaccactgctgtgcttctctctcggcagatcggtgggggcaggaacatggaccaccacrtcctgcatgtggctgtggatgtcatcagggagtctcgggagatgcggctgcagcccttcaatgagtaccgcaagaggtttggcatgaaaccctacacctc

SEQ ID NO: 19223 - DNA, 201 bp, Homo sapiens
tatatatacatatatatcaatatatacatatacatatcaatacatatatacatatacacacacatatatatgtgtgtgtatatatatactatatatatacatatatatatatacatatatatatatacatatatatatacatatatatatacatatatatatatatatacatatatatatatatatttcccccaatatcct

SEQ ID NO: 19224 - DNA, 201 bp, Homo sapiens
atatatacatatatatcaatatatacatatacatatcaatacatatatacatatacacacacatatatatgtgtgtgtatatatatactatatatatacatatatatatatacatatatatatatacatatatatatacatatatatatacatatatatatatatatacatatatatatatatatttcccccaatatcctc

SEQ ID NO: 19225 - DNA, 201 bp, Homo sapiens
tccagataggagaagctactgctgtttcctaccccccaaccagggaagaagcagttgccagatgcccagctcctggcccgccgcttcctgctcaggaggamgttcatacctgacccccaaggcaccaacctcatgtttgccttctttgcacaacacttcacccaccagttcttcaaaacttctggcaagatgggtcctggc

SEQ ID NO: 19226 - DNA, 201 bp, Homo sapiens
ttacactcgtattctgccctctgtgcctaaagattgccccacacccatgggaaccaaaggtaaaatggggtgaggagctgggcctggggattacaggaggygctcagttcttctctttgggaaaaatcaggcgaagaacaattattgacccaattctgcagatggctagaccaaggcaagacatatgacatgtccagagcc

SEQ ID NO: 19227 - DNA, 201 bp, Homo sapiens
tctctggacttgactcagtgcccatcttctagatggggatagggcatgacctggcaaccagagctgcatgccaggcagaggagccccaggccagctgaccygggcacatggggcaagatgccagctgtgccaaggctgcccgggtgcctgcacctgctctcgccagcaccagttgggtctgtgggccgggagagggcttcc

SEQ ID NO: 19228 - DNA, 201 bp, Homo sapiens
tgagagagctggaggctgtccagcacactggctggagatgaagctgtgaccaaaggcaggaccctagggcaccatttaactcccctacaacctcatgagcygggtatgattaccctgtgaaaatcaagattcagagaggtgaagtgaactctccagggacactcagcagatggagacttgaggtctggttgccaccaaaat

SEQ ID NO: 19229 - DNA, 201 bp, Homo sapiens
accaaaggcaggaccctagggcaccatttaactcccctacaacctcatgagccgggtatgattaccctgtgaaaatcaagattcagagaggtgaagtgaaytctccagggacactcagcagatggagacttgaggtctggttgccaccaaaatctatgctacttccactccatcacaaagggggctcttcttgaatgggaa

SEQ ID NO: 19230 - DNA, 201 bp, Homo sapiens
cacctgctctcgccagcaccagttgggtctgtgggccgggagagggcttccccaccagcaggctcttccagctgctgggcccagttgtctggatctggtgyggtggtgcttaggtgtggggactggggcccaggccaaaccagtcagggttccccaccttttttttttttctctctggctgccaggtccccagagactctc

SEQ ID NO: 19231 - DNA, 201 bp, Homo sapiens
gggcagaaggtctgggttgccctcatatttccaagtctgcgagtaaactgagggccaagctacttgggcatctgccccaggaagccaaagcctgtcttttrcctctagaggcaaaggagatgaagagatgagggctgcactcacctaagagggcaggcggagggagagaatgctgcttttgcctctctggtgggtgaggag

SEQ ID NO: 19232 - DNA, 201 bp, Homo sapiens
gaccccggtgcccggtggggaattttcttggcctcctggtggagccttgaatgccaggctcagcccctcatctctctcctctgcagggagtctcttgctcyggttcttgctgttcctgctcctgctcccgccgctccccgtcctgctcgcggacccaggggcgcccacgccaggtaggcggccccatccctccccaaggga

SEQ ID NO: 19233 - DNA, 201 bp, Homo sapiens
ccccatcaggggctagatgggggtcaggaggccaccctagcatggtctctgacctccatttctcacccacagtgaatccctgttgttactatccatgccarcaccagggcatctgtgtccgcttcggccttgaccgctaccagtgtgactgcacccgcacgggctattccggccccaactgcaccatccgtgagctgggcc

SEQ ID NO: 19234 - DNA, 201 bp, Homo sapiens; identical to SEQ ID NO: 4867

SEQ ID NO: 19235 - DNA, 201 bp, Homo sapiens
tatcaatatatacatatacatatcaatacatatatacatatacacacacatatatatgtgtgtgtatatatatactatatatatacatatatatatatacatatatatatatacatatatatatacatatatatatacatatatatatatatatacatatatatatatatatttcccccaatatcctcagatgttgggcag

SEQ ID NO: 19236 - DNA, 201 bp, Homo sapiens; identical to SEQ ID NO: 4868

SEQ ID NO: 19237 - DNA, 201 bp, Homo sapiens
agcacatagcaggccttcagaaaatagatgactgtgatggttgattattagctgggtgactcagcacatttgattagccaccctgagtctcggtttccccygtgtgctgcgcccggatgcatacttgtggtccccagcacgtgcagggtcaaactgtaacttgcccggccttcaggaatcttcatgttcccttccctgcat

SEQ ID NO: 19238 - DNA, 201 bp, Homo sapiens
atggcccatgagagttcccagtggaggatggatttgaggaactgggcagggaagcagggaagctccatatttgtctccccttggccacatgaacatgtggrtattgcagagtggagcagattctgtgcatgagctccttgtgatcctggaacagcatcttattctttactctcccatgacaaatggtccccgggggcagaa

SEQ ID NO: 19239 - DNA, 201 bp, Homo sapiens
atcaatatatacatatacatatcaatacatatatacatatacacacacatatatatgtgtgtgtatatatatactatatatatacatatatatatatacatatatatatatacatatatatatacatatatatatacatatatatatatatatacatatatatatatatatttcccccaatatcctcagatgttgggcagc

SEQ ID NO: 19240 - DNA, 201 bp, Homo sapiens
ctgggctggagtgcagtggtgtgattttggctcactgtaacctctatctcctgggttcaagtgattcacctgcctcagtctcccaaatagctgggattacwggcacctgccaccacgcccagctaatttttgtatttttagtagagacgagtctttgccatgttggccaggctggtcttgaactcctggcctcaagtgatc

SEQ ID NO: 19241 - DNA, 201 bp, Homo sapiens
agatacaatcttgctctcttgcctgggctggagtgcagtggtgtgattttggctcactgtaacctctatctcctgggttcaagtgattcacctgcctcagyctcccaaatagctgggattactggcacctgccaccacgcccagctaatttttgtatttttagtagagacgagtctttgccatgttggccaggctggtctt

SEQ ID NO: 19242 - DNA, 201 bp, Homo sapiens; identical to SEQ ID NO: 4869

SEQ ID NO: 19243 - DNA, 201 bp, Homo sapiens
atcctaagcaccagagctttcttttctttcctttttttttttttttttttgagatacaatcttgctctcttgcctgggctggagtgcagtggtgtgatttyggctcactgtaacctctatctcctgggttcaagtgattcacctgcctcagtctcccaaatagctgggattactggcacctgccaccacgcccagctaatt

SEQ ID NO: 19244 - DNA, 201 bp, Homo sapiens
tacaacctcatgagccgggtatgattaccctgtgaaaatcaagattcagagaggtgaagtgaactctccagggacactcagcagatggagacttgaggtckggttgccaccaaaatctatgctacttccactccatcacaaagggggctcttcttgaatgggaaggggttgcaaacctgagtctgatctgtgacatgtgag

SEQ ID NO: 19245 - DNA, 201 bp, Homo sapiens
attgcaaagatacacaaaagttgagagaaaagcagaatgaactatgtacccatctttcagtttcaacatttacccacagtttcttcatcttatttcatttstcccctctcatatttttataaagtattttaaatcaaattctaaaaatcatgccacttaaaattctaaaaatcatgccacttcacccataaatacttctag

SEQ ID NO: 19246 - DNA, 201 bp, Homo sapiens
cttacattatctctcgcagtcctcagattcactgtatcaaatgggtatcatttgcccctttttaaagatggagaaattgacacccagagagatgagatgayttatctgtattcacacagctagcaaatagcatagtcagttgcaaacacaggctaccttgactcagggcaagggagttcatgtttgtttttttctgtttct

SEQ ID NO: 19247 - DNA, 201 bp, Homo sapiens
atgggggactcaaagtgaattagacttggtacctgcatctccttggttttctttcttgatgaacaggggtgtcctccactgagcatagaactgagttggcrtgaaaacatgcaggattgaagttagaccgaaggaaggccttcctgtacgaatacttcctaaagatctggttgtggcaggagatggtgatccccctggggt

SEQ ID NO: 19248 - DNA, 201 bp, Homo sapiens
gttccccaccttttttttttttctctctggctgccaggtccccagagactctctaaatattactctttaggggatttgggtcctgcctcttcactgggcartcttgcagcctgacacctctgcatcctggaggacttggtgttccctggctgtgcctgtcccctagtcacgctcagtcctggacctggagccctgactttt

SEQ ID NO: 19249 - DNA, 201 bp, Homo sapiens
taggtgtggggactggggcccaggccaaaccagtcagggttccccaccttttttttttttctctctggctgccaggtccccagagactctctaaatattaytctttaggggatttgggtcctgcctcttcactgggcaatcttgcagcctgacacctctgcatcctggaggacttggtgttccctggctgtgcctgtcccc

SEQ ID NO: 19250 - DNA, 201 bp, Homo sapiens
gcccatcttctagatggggatagggcatgacctggcaaccagagctgcatgccaggcagaggagccccaggccagctgacccgggcacatggggcaagatsccagctgtgccaaggctgcccgggtgcctgcacctgctctcgccagcaccagttgggtctgtgggccgggagagggcttccccaccagcaggctcttcca

SEQ ID NO: 19251 - DNA, 201 bp, Homo sapiens
tgatcaaaatgactatctcttaagcatgaacgttattatttcatcctaagcaccagagctttcttttctttcctttttttttttttttttttgagatacartcttgctctcttgcctgggctggagtgcagtggtgtgattttggctcactgtaacctctatctcctgggttcaagtgattcacctgcctcagtctcccaa

SEQ ID NO: 19252 - DNA, 201 bp, Homo sapiens
gggctgcactcacctaagagggcaggcggagggagagaatgctgcttttgcctctctggtgggtgaggagatggaggccagcctggaggcaaggctgtgcygggggcgccctgaatgctcaagtacttcccctctagtctctggacttgactcagtgcccatcttctagatggggatagggcatgacctggcaaccagagc

SEQ ID NO: 19253 - DNA, 201 bp, Homo sapiens
gtggcgggtgggggaaacactaagagactcgaccaggaaacaccgtaagggtaatgtggagcaggaggctgaggttggatgcgtaatgtggggatgagacyggaggccagaaaactggtaccgaggctcctgcaaggatctaggaaagaacgaatgactggtggagtgcaggggcagaaggtctgggttgccctcatattt

SEQ ID NO: 19254 - DNA, 201 bp, Homo sapiens
tacatatgcgggaactcaaacttagcttgaatagctgcccaaggtccctatattagtttcctcaggctgctgcaacaaagtaccacaaactgggaagctcrgagcaacagatggaggctagaagtctgaattcaaggtgtcagcagtgccatgttctctctcaaggctctatgcctccttggcatctggtggtggccgaca

SEQ ID NO: 19255 - DNA, 201 bp, Homo sapiens
gagtagctgggattacaggtgcccgccaccatgcctggctaatttttgtatttttagtagagacagggttttgccatgttggccaggatgatcttgaactsctgacctcaggtgatccacccgccttggcatcccaaagttctgggtttataggcatgagccacagcgcctggccgcactgatattattataacacacatt

SEQ ID NO: 19256 - DNA, 201 bp, Homo sapiens
tatctctcctattcccttggtctgtgaccttcttctggatcctagagcccagaccccaccctgatgtgggccaagtctgattccatcaggaatgggggctraggcagctgagaccttggagtccccctcctcctgcacacccaccctctgtccccagggttctggaaaacttctttccttagacttggctgctgaggctgt

SEQ ID NO: 19257 - DNA, 201 bp, Homo sapiens
agtttctccaggaggcagcagggcggatgccagagctccatgcaccctcccaggagattttctagccctatctctcctattcccttggtctgtgaccttcktctggatcctagagcccagaccccaccctgatgtgggccaagtctgattccatcaggaatgggggctgaggcagctgagaccttggagtccccctcctcc

SEQ ID NO: 19258 - DNA, 201 bp, Homo sapiens
gttgctcaagttagtctcctggagtccctattatccccagaaaaaggtggacctggaagggtcccgccccaggttgaccttaatggcatcatggatctgaygctagcatttccccttatctccttgtaggagagaaggagatggcagcagagttggaggaattgtatggagacattgatgcgttggagttctaccctggac

SEQ ID NO: 19259 - DNA, 201 bp, Homo sapiens
aatggcatcatggatctgatgctagcatttccccttatctccttgtaggagagaaggagatggcagcagagttggaggaattgtatggagacattgatgcrttggagttctaccctggactgcttcttgaaaagtgccatccaaactctatctttggggagagtatgatagagattggggctcccttttccctcaagggtc

SEQ ID NO: 19260 - DNA, 201 bp, Homo sapiens; identical to SEQ ID NO: 4858

SEQ ID NO: 19261 - DNA, 201 bp, Homo sapiens; identical to SEQ ID NO: 4860

SEQ ID NO: 19262 - DNA, 201 bp, Homo sapiens; identical to SEQ ID NO: 4861

SEQ ID NO: 19263 - DNA, 201 bp, Homo sapiens
aagatgtagggagaagaaagccatctacaagccaaggaaagaggcctcaggagataccaaccctgctgacaccttgatcttgaacctctggtctccagacrgaggaaataatttctattgtttgagccactcattctgtggtacattgtcatggcagccctagcaaacaaacacattctctttccctggaattcccagcca

SEQ ID NO: 19264 - DNA, 201 bp, Homo sapiens
gtgctgcgcccggatgcatacttgtggtccccagcacgtgcagggtcaaactgtaacttgcccggccttcaggaatcttcatgttcccttccctgcatgtrtctaccttcctgcagtttggtagcttctaggtgactcagggacaggatatttttgtgttccctatgggggcgagtctgcaacctaaaatgtcagatggtt

SEQ ID NO: 19265 - DNA, 201 bp, Homo sapiens; identical to SEQ ID NO: 4864

SEQ ID NO: 19266 - DNA, 201 bp, Homo sapiens
accatgctctgggagtcaggaagggacatctgacccagagttgcgggttatgggaaaagaagggatgtccaagcagaaattggaaggagggatagagattkcccagggtaagaggtggtgttagtggcaggggatggctgtgttccagatagagaggacggcatgggtgaaaggcatggaagtcagaggacatggcagttt

SEQ ID NO: 19267 - DNA, 201 bp, Homo sapiens
atcagcccagcacttcctctgaggccccatctggcctcatccaggcactcttggtatacaggtcccacccgtctgtattcttttttagtccattcactaaygcacaatgagccatggtctgtgctattttgttttttgccttttctgtttccttttgtataataaatgtttacacggaattgtttttttttatccccaagg

SEQ ID NO: 19268 - DNA, 201 bp, Homo sapiens
aagcccaccatgctctgggagtcaggaagggacatctgacccagagttgcgggttatgggaaaagaagggatgtccaagcagaaattggaaggagggatakagatttcccagggtaagaggtggtgttagtggcaggggatggctgtgttccagatagagaggacggcatgggtgaaaggcatggaagtcagaggacatgg

SEQ ID NO: 19269 - DNA, 201 bp, Homo sapiens
agcttggtgacttggagggagtgtaaaaatgggagcgtttgctgagcctagtgatggagcgtaagaatgactttacaggaaggtggagatgtctgtggggrccgtgttaaggaattctactttctgccaagagcagagagagtatttggaaaggttttaagtcagctcatgatgcaagatttgttgtttttttttttttaa

SEQ ID NO: 19270 - DNA, 201 bp, Homo sapiens
ctgattttaagagacattttggaggtggaatcaacagccttggctgaggggaactggcagctggaggcaggagtgggagggagttggttgtgggcagctgygggtgacccccaaccccaggttgccaggtggccccatcccacaggtgctggatggagaaatgtacccgccctcggtagaagaggcgcctgtgttgatgca

SEQ ID NO: 19271 - DNA, 201 bp, Homo sapiens
caggctcttccagctgctgggcccagttgtctggatctggtgcggtggtgcttaggtgtggggactggggcccaggccaaaccagtcagggttccccaccttttttttttttctctctggctgccaggtccccagagactctctaaatattactctttaggggatttgggtcctgcctcttcactgggcaatcttgcagcc

SEQ ID NO: 19272 - DNA, 201 bp, Homo sapiens
aggctcttccagctgctgggcccagttgtctggatctggtgcggtggtgcttaggtgtggggactggggcccaggccaaaccagtcagggttccccaccttttttttttttctctctggctgccaggtccccagagactctctaaatattactctttaggggatttgggtcctgcctcttcactgggcaatcttgcagcct

SEQ ID NO: 19273 - DNA, 201 bp, Homo sapiens
ctgatgctagcatttccccttatctccttgtaggagagaaggagatggcagcagagttggaggaattgtatggagacattgatgcgttggagttctacccyggactgcttcttgaaaagtgccatccaaactctatctttggggagagtatgatagagattggggctcccttttccctcaagggtctcctagggaatccca

SEQ ID NO: 19274 - DNA, 201 bp, Homo sapiens
tcctgcatgtggctgtggatgtcatcagggagtctcgggagatgcggctgcagcccttcaatgagtaccgcaagaggtttggcatgaaaccctacacctcyttccaggagctcgtaggtgagcagctgtttcctggatgcagtccctgcccttgagggactggcagcaaagtcagggagacatcaaggaaatagaacggga

SEQ ID NO: 19275 - DNA, 201 bp, Homo sapiens
cttttttgcttgggtgcagtgcagagactggcctgtctggggataggagtggaaatagggagcccacttagggaaaggagtcagagtggaagatgagcggrggttgcttgaggtagtggtggtagagatggagagcaggggactgattttaagagacattttggaggtggaatcaacagccttggctgaggggaactggca

SEQ ID NO: 19276 - DNA, 201 bp, Homo sapiens
cggtgggggcaggaacatggaccaccacatcctgcatgtggctgtggatgtcatcagggagtctcgggagatgcggctgcagcccttcaatgagtaccgcragaggtttggcatgaaaccctacacctccttccaggagctcgtaggtgagcagctgtttcctggatgcagtccctgcccttgagggactggcagcaaagt

SEQ ID NO: 19277 - DNA, 201 bp, Homo sapiens
ccataggtgctactctgttccaccctggcccttgtcctcagtgccccatcttccaccctggctacttctggttctggtaggagggaccaactgagtgactsccattgcccctgcagctggcctgtggacctggctccggaattcactgcggcccagcccctctttcacccacttcctgctcactcacgggcgctggttctg

SEQ ID NO: 19278 - DNA, 201 bp, Homo sapiens
tggctgaccctatttccaatcctgccctgcccaggggagaccatcaagattgtcatcgaggagtacgtgcagcagctgagtggctatttcctgcagctgaratttgacccagagctgctgttcggtgtccagttccaataccgcaaccgcattgccatggagttcaaccatctctaccactggcaccccctcatgcctgac

SEQ ID NO: 19279 - DNA, 201 bp, Homo sapiens
tgatgaagaatgtttctacccaattgaggagtcagctaagtagaaacagaccaaaaggcaaggaagaacagccagcaagccgctcatacctgcccaacagyaaggtggatagagatgtatgttagcatggtaatgacaggaatgaaaaggaaagaatctaaaacgtagtgaagggaggaaatggtagctgcagcgtgcctg

SEQ ID NO: 19280 - DNA, 201 bp, Homo sapiens; identical to SEQ ID NO: 4896

SEQ ID NO: 19281 - DNA, 201 bp, Homo sapiens
gcctcccaggactgcaccccatcttcaaggtacttattaatctattaaatcacatatccctcagaccccagagagaggaacagccccatatcaaaagataytgcagcagcaaaaactctttgtagcaatttgtgagtgaagaggagactgtctcaatatcttgagatgttgattttaattaagtttattaagtttagtcac

SEQ ID NO: 19282 - DNA, 201 bp, Homo sapiens
tcttacttagtcatctctgtttccccaagaatgctgactataatgtcatatacggaatgggagttcaataatttctctttctcccagattcagcctcccarccccagctctccaaccccaacactgttcctgccctcagaccccccacttgcctggctcctggcaaagtcctgggtccgaaattcagatttccaactgcac

SEQ ID NO: 19283 - DNA, 201 bp, Homo sapiens
tagaaaggagtcaccatttagatgccattaagaaaattcatgattgaggccaggcactgtggctcatgcctgtaatcctagcactttgggaggctgaggcrggcggatcacctgaggtcaggagttcgagaccagcttggccaacatggtgaaaccccgtctttttttttcctgagacagagtctcactgagtggcccagt

SEQ ID NO: 19284 - DNA, 201 bp, Homo sapiens
tttgtagagatggggtttcgccatattgcccaggctggtcttgaacttctgggctcaagtaatctgcctgcctcggcctcccaaagtgctgggattacagstgtgagccactgcacctggccttctctcactattcttaacagtcaggtgacaagaactgtcaataatcttacacctcctacttctccttcacattccacc

SEQ ID NO: 19285 - DNA, 201 bp, Homo sapiens
ccggtgagcaggcggcgtcggggaaggaggcacaaggtcccgggaactgctgcggggctaggagggcagagttaaggacggtcggagcagacttagaggakgtatgggcccagggcaggtgaaatgtagggatcccagggtgctggacagaaaacgggaaggagttatgaattcccaaagttttacacaggctaagagagg

SEQ ID NO: 19286 - DNA, 201 bp, Homo sapiens
tttttgtagagatggggtttcgccatattgcccaggctggtcttgaacttctgggctcaagtaatctgcctgcctcggcctcccaaagtgctgggattacrgctgtgagccactgcacctggccttctctcactattcttaacagtcaggtgacaagaactgtcaataatcttacacctcctacttctccttcacattcca

SEQ ID NO: 19287 - DNA, 201 bp, Homo sapiens
tgctgacactaccagttcaggactacactttcagaatcactatctcatctctcagtggcctctggctctgaaccctcgccatctcttgaatatcttttctygcaatttcttttttttttttgagacagaatctcactgtgtcactcaggctggaatacagttgtgtgatcttggctcactgcaacctgcgcctcctgggtt

SEQ ID NO: 19288 - DNA, 201 bp, Homo sapiens
caacctctgctcccagggacccaacccccagctcttggctcccaaaccccatcctcactcagtgagacttgtcttcatgtcactatttgcctgtaccctcrtctcccctgcctcatccaactagaattactttttcaagagtcaaaatggcctcttggagttctcatcctgtatccaatggtcctcacacttcagtgtgca

SEQ ID NO: 19289 - DNA, 201 bp, Homo sapiens
ctgccaccacatccacacacaagacatctaccctcaccagactgtttcttcactttaagatgagaggaactggaccaggggctctagttctcccaacaggrctccggtactgatgcaggagaatggcaagaagctagactaaatctcttgccctttgccccggccccctgggggtagactttgaactctaaaaatggatac

SEQ ID NO: 19290 - DNA, 201 bp, Homo sapiens
taggtaccctggggaacccctggtcgttgacggaagcacagcgttcaagggcggcagagctcaggtactggaggacacatgggccgcgccgggtctagccrcgggacatccccagaccccagcacggcctcccaggccgaccttccagaagccggcccactgccttccccgggtcccagcccagaaaagcggagaccttcc

SEQ ID NO: 19291 - DNA, 201 bp, Homo sapiens
agtggactgagataacctttgtgggagcccctctcagctgtgacactggaaatccatgacttattccccacattataacgcagacacttgtaattctgtcygggaataggattacgcattcctaaattatttatttattttttaatttttaaatagagacaggctcttgctctgtcacctgactaccagcaatcctcctgc

SEQ ID NO: 19292 - DNA, 201 bp, Homo sapiens
agtttagtcacttaacattatataggaatcctctgaaattctcagagatctgacagtctagcagtgcgctcacagtagggcttgaacactgctagtaaaamaaaagccatattcctaccttagatctagtatttagccagaaaaacaagtgatgcccataagaaccaaccagagaacagtatctggtactagagtttgaaa

SEQ ID NO: 19293 - DNA, 201 bp, Homo sapiens
ccccagcctctcatcacgcctcccttcctccctccacacgggaaagcatgtgtatcccattcccacctcctccgactcaggacaattctagagacccaagractgtcctcctcagagaccctggccatcaacccctagtcccactacaccccagtcacagatgcccctgaactgccatatcctggggccccccaggccata

SEQ ID NO: 19294 - DNA, 201 bp, Homo sapiens
caggttgtgcgggggcgggaacgaggcgatgctgtctttggaggccctgagaaactgaggttgcacaggagcgcggctctgtcctcgaaacggcctcagtygggtccctcctactaagtctggcctgggtccggcctgcacaggaggaggagtttgatcatgacgttgcagaggacttggggctcctgcagttcgtgaggc

SEQ ID NO: 19295 - DNA, 201 bp, Homo sapiens
ccgtaaggatgatctacctccaaatatgagattccatgaggagaagaggctggactttgaatggacactgaaggcagggtgagaaaaaggctagacctcgragtgaaataagggctgggagggccaagaatgatgatagacggtgagggactgagggatcagctgatgagttaagcctcaatacctgtcctagggctctgg

SEQ ID NO: 19296 - DNA, 201 bp, Homo sapiens
tcggaaggaggcggctggttggctgtgggatgcatagcctgtgggcgggctccacaccccccctcccatttttgctatcccccctctccccttctgacagygcgaagtggacggagacggaaatagagatgctgagggctgctgtgaagcgatttggggacgatcttaatcacatcagctgtgtcatcaaggaacggacag

SEQ ID NO: 19297 - DNA, 201 bp, Homo sapiens
caccccccaccacacccggctaattttttatattttttttagtagagatggagtttcaccgtattagccaggatggtctcgatctcctgacctcgtgatcygccctccttggcctctcaaagtgctgggattacaggcttgagccaccacgcccggcccaaatagtgaatttttaaccatgggtaatgagtaaaagagaga

SEQ ID NO: 19298 - DNA, 201 bp, Homo sapiens
gtggccttcccgtgctaccgctgggtgcagggcgaggacatcctgagcctgcccgagggcaccggtgagcaggcggcgtcggggaaggaggcacaaggtcycgggaactgctgcggggctaggagggcagagttaaggacggtcggagcagacttagaggatgtatgggcccagggcaggtgaaatgtagggatcccaggg

SEQ ID NO: 19299 - DNA, 201 bp, Homo sapiens
tcctgccctcagaccccccacttgcctggctcctggcaaagtcctgggtccgaaattcagatttccaactgcacgagatccagtatcacttgctgaacackcacctggtggctgaggtcatcgctgtcgccaccatgcggtgcctcccaggactgcaccccatcttcaaggtacttattaatctattaaatcacatatccc

SEQ ID NO: 19300 - DNA, 201 bp, Homo sapiens
gggagggccaagaatgatgatagacggtgagggactgagggatcagctgatgagttaagcctcaatacctgtcctagggctctggagatggccctcaaacrtgtttacaccctcctgagctcctggaactgcctagaagactttgatcagatcttctggggccagaagagtgccctggctggtcagtggttccccgaggtc

SEQ ID NO: 19301 - DNA, 201 bp, Homo sapiens
aggagacgaggaggaatgaggatggcaaatagtgaatttttttttttttttttttgagatggagtcttgctttgttgcccaggctggagtgcagtggcgcsatcttggctcactgcaacctccacctcctgggttcacgccattctcctgcctcagcctcccgagtagctgggactacaggcaccccccaccacacccggc

SEQ ID NO: 19302 - DNA, 201 bp, Homo sapiens
tgcaggcctggtgtcgggagatcacggaggtggggctgtgccaggcccaggaccgaggtaagatccattctagagacagaagaagctcctgggagactctsccagggcgccttcccagccctgcccttctggggacaggaccccagcctctcatcacgcctcccttcctccctccacacgggaaagcatgtgtatcccatt

SEQ ID NO: 19303 - DNA, 201 bp, Homo sapiens
cgcaggagacgaggaggaatgaggatggcaaatagtgaatttttttttttttttttttgagatggagtcttgctttgttgcccaggctggagtgcagtggygcgatcttggctcactgcaacctccacctcctgggttcacgccattctcctgcctcagcctcccgagtagctgggactacaggcaccccccaccacaccc

SEQ ID NO: 19304 - DNA, 201 bp, Homo sapiens
cgtgaaagacaagaagcacactggcccgcaggagacgaggaggaatgaggatggcaaatagtgaatttttttttttttttttttgagatggagtcttgctytgttgcccaggctggagtgcagtggcgcgatcttggctcactgcaacctccacctcctgggttcacgccattctcctgcctcagcctcccgagtagctgg

SEQ ID NO: 19305 - DNA, 201 bp, Homo sapiens
ctctgtgggactgggtttcccgggcgagagactgaatcccttctcccatctctggcatccggcccccgtggagagggctgaggctggggggctgttccgtytctccacccttcgctgtgtcccgtatctcaataaagagaatctgctctcttcagccctgtgtctgtgcttgagtgggggcgagcacggggctgagactag

SEQ ID NO: 19306 - DNA, 201 bp, Homo sapiens
ctggaactgcctagaagactttgatcagatcttctggggccagaagagtgccctggctggtcagtggttccccgaggtctccataatcccttaatggcccstctggatgactcatcacactccacagtcccccgtaactctttgcaagaagagaccttatcatatctggtcaactcagagaggccttgagaatgaaaacgc

SEQ ID NO: 19307 - DNA, 201 bp, Homo sapiens
ggccctggagcctgcgcggaggtggccttcccgtgctaccgctgggtgcagggcgaggacatcctgagcctgcccgagggcaccggtgagcaggcggcgtyggggaaggaggcacaaggtcccgggaactgctgcggggctaggagggcagagttaaggacggtcggagcagacttagaggatgtatgggcccagggcagg

SEQ ID NO: 19308 - DNA, 201 bp, Homo sapiens
tccagctcagctgcttccctactttgtcactagttttttagaatccccttgaggactgaaagaatagaattgtcacagttggtcagaagttcctaaaatgytgtggtaatccttccaagaatgtgaatttaggttgcctgagatgctgttattgtatttgatgatggaagtcccctggttatttatataaatgtttgagga

SEQ ID NO: 19309 - DNA, 201 bp, Homo sapiens
cagctaagggaagaaaacataggatgctggagagctggtttggttggaataacacggaagacacccgtgaaagacaagaagcacactggcccgcaggagaygaggaggaatgaggatggcaaatagtgaatttttttttttttttttttgagatggagtcttgctttgttgcccaggctggagtgcagtggcgcgatcttg

SEQ ID NO: 19310 - DNA, 201 bp, Homo sapiens
agcccggactgggacgtggacgctgagagcgggcgcttggactcggtcacagacacggaccctctctagcacagggacagacattagtttccctttgtgcstggcacagcacagagtcggtgttaataaatgatcgttgggtgagggaatgaatgacagataaaaatacagacaggcccatagcccagactcctgtttcac

SEQ ID NO: 19311 - DNA, 201 bp, Homo sapiens
tcccgggttcacgccattctcctgcctcagcctcccgagtacctgggactacaggtgcccgccaccacacctggctaacttttcgtatttttagtagagasggggtttcaccgtgttagccaggatggtctcgatctcctgacctcgtgatccgcccatcttggcctccccaagtgctgggactacaggcgtgagccaccg

SEQ ID NO: 19312 - DNA, 201 bp, Homo sapiens
tcctagcagtttgggctactacaacaaaacactagctgggcacagtggctcacgcttgtaatcccagcactttgggaggctgaggtgggtggatcacgagstcaggagttcgagaccagcctggccaacatagtgaaacccgtctctactaaaaatacaaaaattagccaggcgtcgtggcacgcacctgtaatcccagct

SEQ ID NO: 19313 - DNA, 201 bp, Homo sapiens
gaagcgatcctctaacctcagccttcagagtagctgggactacaggtgtgcaccaccatgcctggctaattttttttattttttgtagagacagggtttcrctatgtggcccaagctagtctcaaattcctgggctcaagcgatcctcctgcctcagcctcccaagtaacctggattgcaggcacatgccgccacacccag

SEQ ID NO: 19314 - DNA, 201 bp, Homo sapiens
tcctagttcagtcctctccgtgtctccactcaccacagtaatgccatgccccagcggacagctgagttgctggcagatgcacacaagggtcaagcctgcasatgtcttaacagtggcctatgcaggctctgactttggattgctggggtcttagtcctgaaccccggcctcaataatttccagatgtcctcacatgttcca

SEQ ID NO: 19315 - DNA, 201 bp, Homo sapiens
tagggccccggcgcgtttccccgctccagcccctcctctatttaaagactccctgcaccgtgtcacccaggtcgcgtcccacccttgccggcgccctctgygggactgggtttcccgggcgagagactgaatcccttctcccatctctggcatccggcccccgtggagagggctgaggctggggggctgttccgtctctcc

SEQ ID NO: 19316 - DNA, 201 bp, Homo sapiens
ggctgctagtcagtttgggctactataacaaaacactggccaggcgcggtggctcacgcctgtaatctcagaactttgggaggccaaggggggcgggaatyacctgaggtcaggagttcgagaccagcctggccaacatggtaaaaccccatctctaccaaaaatacaaaaattagccaggcatggtggtgcgtgcctgta

SEQ ID NO: 19317 - DNA, 201 bp, Homo sapiens
ggcctgctgggactcccaggtgctctctatgcccatgatgctttacggctctgggagatcattgccaggtgagtaaggaggagctgagaaatggtggggcsgggggggggggggctctggcctgaggccagcatggggcaaaagcaagaaggtccagaaaggagaagcagagaactcaatcctggggagagatgaggaaaa

SEQ ID NO: 19318 - DNA, 201 bp, Homo sapiens
ttctgtctcaggtgcctctggggcaccacaaagaaaaatatttctcaggccccaagcccaaagctgtgctaaaccaattccgaacagatttggaaaagctrgaaaaggagattacagcccggaatgagcaacttgactggccctatgaatatctgaagcccagctgcatagagaacagtgtcaccatctgagccctagagt

SEQ ID NO: 19319 - DNA, 201 bp, Homo sapiens
tacctctccttcccctgcctggcactgttctctccttagtagtgtggtgagaacggacagagagaatccaaactgagtcagaggaaggctgcagtactgcrttgccccttggtgcagtcctgtgctggaaaaatacagaaataaaatatgtaggggaagaaactatgaggagctcccagcaggaaggggaaaatagaatgg

SEQ ID NO: 19320 - DNA, 201 bp, Homo sapiens
ctgggactcccaggtgctctctatgcccatgatgctttacggctctgggagatcattgccaggtgagtaaggaggagctgagaaatggtggggccgggggsgggggggctctggcctgaggccagcatggggcaaaagcaagaaggtccagaaaggagaagcagagaactcaatcctggggagagatgaggaaaagtgagg

SEQ ID NO: 19321 - DNA, 201 bp, Homo sapiens
ttcagctaccagttcctcaatggtgccaaccccatgctgttgagacgctcgacctctctgccctccaggctagtgctgccctcggggatggaagagcttcrggctcaactggagaaagaacttcaggtacctctccttcccctgcctggcactgttctctccttagtagtgtggtgagaacggacagagagaatccaaact

SEQ ID NO: 19322 - DNA, 201 bp, Homo sapiens
gggcctgctgggactcccaggtgctctctatgcccatgatgctttacggctctgggagatcattgccaggtgagtaaggaggagctgagaaatggtggggycgggggggggggggctctggcctgaggccagcatggggcaaaagcaagaaggtccagaaaggagaagcagagaactcaatcctggggagagatgaggaaa

SEQ ID NO: 19323 - DNA, 201 bp, Homo sapiens
ggcaggatgatgagttgttcagctaccagttcctcaatggtgccaaccccatgctgttgagacgctcgacctctctgccctccaggctagtgctgccctcrgggatggaagagcttcaggctcaactggagaaagaacttcaggtacctctccttcccctgcctggcactgttctctccttagtagtgtggtgagaacgga

SEQ ID NO: 19324 - DNA, 201 bp, Homo sapiens
tcactcagtgagacttgtcttcatgtcactatttgcctgtaccctcgtctcccctgcctcatccaactagaattactttttcaagagtcaaaatggcctcytggagttctcatcctgtatccaatggtcctcacacttcagtgtgcatcagaatcacctgaatgcctgttgaaatgcagatttctggatcccatgaccaga

SEQ ID NO: 19325 - DNA, 201 bp, Homo sapiens
gcccccacccaccaccaaggaagatgtgacgatggccacagtgatggggtcactacctgatgtccggcaggcctgtcttcaaatggccatctcatggcatytgagtcgccgccagccagacatggtgagaggggactctcgggagagggaaatgacagttggaaaggaaacatcagagtgaggggctgggctctaggtgcg

SEQ ID NO: 19326 - DNA, 201 bp, Homo sapiens
actccgggcgtctgagacccaaagagcaggttgtgcgggggcgggaacgaggcgatgctgtctttggaggccctgagaaactgaggttgcacaggagcgcrgctctgtcctcgaaacggcctcagtcgggtccctcctactaagtctggcctgggtccggcctgcacaggaggaggagtttgatcatgacgttgcagagga

SEQ ID NO: 19327 - DNA, 201 bp, Homo sapiens
agaagccggcccactgccttccccgggtcccagcccagaaaagcggagaccttcccctccgtttggaagatggactcatcccctacttcctcctggctccmcagaagacctggagacctcgggaagtgttctcatctatgttcgctccaacccgggggctcaggcccacctcgatcccgccttcccgggaggtccaggaag

SEQ ID NO: 19328 - DNA, 201 bp, Homo sapiens
tgctgtgaagcgatttggggacgatcttaatcacatcagctgtgtcatcaaggaacggacagtgtgagggagggtggctgccagaaaagggcgggtgggcmgccttcttcctccttacccaaggttccatcgtcctcagaactcctttccagctcagctgcttccctactttgtcactagttttttagaatccccttgagg

SEQ ID NO: 19329 - DNA, 201 bp, Homo sapiens
gccttcccgggaggtccaggaaggtcccgccgcacccaccccgttggcctcaccctggctcgggcccctttatcatcctgcagctacgctccgaccaggargcacagccagtccccacagccggctctaccgctctgctcgcaggtttgggctagtctggggcggggacttgggagcgcctaaaacttgcgaggagggcgg

SEQ ID NO: 19330 - DNA, 201 bp, Homo sapiens
acagaaagaggaatagaggtcagaggcgggggctttctgccctcaagtgccttttccccctgggcaggtatgtggaggggatcgtccacctcttctaccaragggatgacatagtgaagggggaccctgagctgcaggcctggtgtcgggagatcacggaggtggggctgtgccaggcccaggaccgaggtaagatccatt

SEQ ID NO: 19331 - DNA, 201 bp, Homo sapiens
gtgagttccatatatattgctgggagaaggcaaaataagacctgtgcttgcttaagaaaatgttcttaaaatcttgatgatactttatatacagggaacttggcagagggagcacaaaaatgatacaagcttacaaaccagagtaattgtcagaaacagtaaagttagaagaaaccagagtcagcaaaaatgaggtgtttg

SEQ ID NO: 19332 - DNA, 201 bp, Homo sapiens
tcatcccctacttcctcctggctccccagaagacctggagacctcgggaagtgttctcatctatgttcgctccaacccgggggctcaggcccacctcgatyccgccttcccgggaggtccaggaaggtcccgccgcacccaccccgttggcctcaccctggctcgggcccctttatcatcctgcagctacgctccgaccag

SEQ ID NO: 19333 - DNA, 201 bp, Homo sapiens
gaagagtgccctggctggtcagtggttccccgaggtctccataatcccttaatggcccctctggatgactcatcacactccacagtcccccgtaactcttygcaagaagagaccttatcatatctggtcaactcagagaggccttgagaatgaaaacgcagaagctgggttcagggagggttatatacctgaacccctggg

SEQ ID NO: 19334 - DNA, 201 bp, Homo sapiens
tggaagatggactcatcccctacttcctcctggctccccagaagacctggagacctcgggaagtgttctcatctatgttcgctccaacccgggggctcagrcccacctcgatcccgccttcccgggaggtccaggaaggtcccgccgcacccaccccgttggcctcaccctggctcgggcccctttatcatcctgcagcta

SEQ ID NO: 19335 - DNA, 201 bp, Homo sapiens
ccaattgaggagtcagctaagtagaaacagaccaaaaggcaaggaagaacagccagcaagccgctcatacctgcccaacagtaaggtggatagagatgtaygttagcatggtaatgacaggaatgaaaaggaaagaatctaaaacgtagtgaagggaggaaatggtagctgcagcgtgcctgggtgcaagagagagaaaag

SEQ ID NO: 19336 - DNA, 201 bp, Homo sapiens
ctaaaattgttgcaggccactttgagaacattttagctgacaacagtgtgaacgaccagaccaaaatccttgtggttaatgctgcctactttgttggcaartggatgaagaaattttctgaatcagaaacaaaagaatgtcctttcagagtcaacaaggtatgtggggcagcatgtagcagtaaaaggagcccaattatag

SEQ ID NO: 19337 - DNA, 201 bp, Homo sapiens
gagtcttgctctgtcccccaggctggagtgcagtggcatgatctcagctcactgcaagctccgcctcctgggttcatgccattctccttcctcagcctccygagtagctgggactacaggtgcctgccacgacgcttggctaattttttgtatttttagtagagacgggctttcactgtgttagccaggatggtctcgatc

SEQ ID NO: 19338 - DNA, 201 bp, Homo sapiens
tgtctgtacgtatgcatgtaactcacagccccttcctgcccgaacatgttggaggccttttggaagctgtgcagacaacagcaacttcagcctgaatcatytctttcaattgtggacaagctgccaagaggcttgagtaggagaggagtgccgccgaggcggggcggggcggggcgtggagctgggctggcagtgggcgtg

SEQ ID NO: 19339 - DNA, 201 bp, Homo sapiens
ttggaaatgattttttttttttttttgagatggagtcttgctctgtcccccaggctggagtgcagtggcatgatctcagctcactgcaagctccgcctccygggttcatgccattctccttcctcagcctcccgagtagctgggactacaggtgcctgccacgacgcttggctaattttttgtatttttagtagagacggg

SEQ ID NO: 19340 - DNA, 201 bp, Homo sapiens
gataactgtgactccaggtaagcaaggtggggtagcagggctggtgacttccttttttcagggaaattcataaatatcgttatttgagctgatttgagatrgtgaacaaaatggacttaggtccattttggggctgttttcaaagacgggctgttgggttgagtactgtcgcctctcatcccccatgttggcagtatttcc

SEQ ID NO: 19341 - DNA, 201 bp, Homo sapiens
gttcacatcctttgcccacttgttgatggggttgtttgattttttcttgtaaatttgtttgagttctttgtagattctggatattagccctttgtcagatragtagattgcaaaaattttctcccattctgtaggttgcctgttcactctgatggtagtttcttttgctgtgcagaagctctttagtttaattagatccca

SEQ ID NO: 19342 - DNA, 201 bp, Homo sapiens
tccatggtgtatatgggccacgttttcttaatccagtctatcattattggacatttgggttggttccaagtctttgctattgtgaatagtgttccaataarcatacgtgtgcatgtgtctttatagcagcatgatttataatcctttgagtatacacccactaatgggatggctgggttaaatggtatttctagttctaga

SEQ ID NO: 19343 - DNA, 201 bp, Homo sapiens
catccagtctccagcttgctcctttggttgccattatgttttagccaccactttattaactgaattataattcctgtccttcttcttctttggtgcattaytctctctgttttttttctttccattttatgctttgatctttcagccattatccagctgtcttggattttacctttcgttcttaaaacgccctccaataaa

SEQ ID NO: 19344 - DNA, 201 bp, Homo sapiens
tttttttgtaaaggtgggatctcactgtgttgtccaggctggtcttgaaatcctggcctcaagcaatcctcagcctcagcctcctgaagtgctaggattayaggcatgagccaccacacctggccttcacaatttacgttacggttcactctttgtgttgtacatttatgagattttaatacgtacacatatatgcttcaa

SEQ ID NO: 19345 - DNA, 201 bp, Homo sapiens
acgtagacaaatctctgaatctttctacagtaagttgtttaaagcaagtagcaagacttaactttttacaaggagtggcattttcatgctgttagacctayaactttttttcagtgaaattcctttctaggatgttcacttgtgatttgaggctttaaataaataaatcctagtggagaggttgagtatagtgggaatcaa

SEQ ID NO: 19346 - DNA, 201 bp, Homo sapiens
ggacccatggttctttctggggcctttcctccttaatattaacaacagccaaaatttatttggcacttacagtgttctagggactgtgctaagttgcctaygtgcattatctcatttaattcttacagcaggctgatgagttagagactgttaccacactcttgtttaccagtgagggagctgaggcacagaggggtgggt

SEQ ID NO: 19347 - DNA, 201 bp, Homo sapiens
gagaggattgccgtacgcatgtctgtacgtatgcatgtaactcacagccccttcctgcccgaacatgttggaggccttttggaagctgtgcagacaacagyaacttcagcctgaatcatttctttcaattgtggacaagctgccaagaggcttgagtaggagaggagtgccgccgaggcggggcggggcggggcgtggagc

SEQ ID NO: 19348 - DNA, 201 bp, Homo sapiens
ctccaggtaagcaaggtggggtagcagggctggtgacttccttttttcagggaaattcataaatatcgttatttgagctgatttgagatagtgaacaaaayggacttaggtccattttggggctgttttcaaagacgggctgttgggttgagtactgtcgcctctcatcccccatgttggcagtatttccagctcccaacc

SEQ ID NO: 19349 - DNA, 201 bp, Homo sapiens
gttcatctacttgcaactgcattcttctaagcggaaattattctcccttcagttttctgggtttcagcataactttaaacaagttacacatttcagatgcrtattcttggacttataaattgtaatagctgcttgtagtttcttactcatatgctgtacactttttcttatggcttcatttaagcatatcatactaaaaac

SEQ ID NO: 19350 - DNA, 201 bp, Homo sapiens
aatgaaacattcaatacaaagaaattcactgacttctacatgaggtttcaattcatatagtgttaccaattttgaaagtgtacatatagcagttgatattyaataatccttttgttagaagagaataacaatgcaatagcttgactacagactctgattttatgaactgcatgtttttcaggagttcatcagctctacgaa

SEQ ID NO: 19351 - DNA, 201 bp, Homo sapiens
ggttctgttaccatctttttcatcccctacatctcccgggaggttttcgataatgggttccaaacctcagtccctgtcagttagtgtaagtgttcgatgarttccttcatgggtggagatgaagcctgtctgaggaaaggagtctccaaaggaaatgagtcagcaggtttatatctttgcttcctaacgccttgaattgtg

SEQ ID NO: 19352 - DNA, 201 bp, Homo sapiens
gcctgtctgaggaaaggagtctccaaaggaaatgagtcagcaggtttatatctttgcttcctaacgccttgaattgtgccacttcaatccctctgggttgyggattgactttggggctatgcagtctcagcgatttgggccattctggtgtggctgagtctggctgtaagtttactgcttggcaacagtgggctgggtcag

SEQ ID NO: 19353 - DNA, 201 bp, Homo sapiens
tgataaagatatctatccatatatatctatattagtatatatgttgtattatattttctggggtagatagtctttatttggtcctcttttcagaagatatgtcgtctcaacatgtgtttcagaaaataaagtacctgtagtcagtgccgataagtgaaattgatgacagtttttggaggccacaactatgtgcacattcag

SEQ ID NO: 19354 - DNA, 201 bp, Homo sapiens
gataaagatatctatccatatatatctatattagtatatatgttgtattatattttctggggtagatagtctttatttggtcctcttttcagaagatatgtcgtctcaacatgtgtttcagaaaataaagtacctgtagtcagtgccgataagtgaaattgatgacagtttttggaggccacaactatgtgcacattcaga

SEQ ID NO: 19355 - DNA, 201 bp, Homo sapiens
ataaagatatctatccatatatatctatattagtatatatgttgtattatattttctggggtagatagtctttatttggtcctcttttcagaagatatgtcgtctcaacatgtgtttcagaaaataaagtacctgtagtcagtgccgataagtgaaattgatgacagtttttggaggccacaactatgtgcacattcagaa

SEQ ID NO: 19356 - DNA, 201 bp, Homo sapiens
taataatctgacactgtgtcaagagcaaatttgtgtatatatatatatgtacatatatatttatgtgtttgcctatatatgtgtatatatgtgcatgtgtrtatatatgtatggggtatatatatatagtatgtatatataagtgtgtatatataggtgtgtgtatatgtatatgtatgtatatgtatgtatgcatatata

SEQ ID NO: 19357 - DNA, 201 bp, Homo sapiens
acctaggttcaaatccagacactggtacttactaactgatatttggacacaaagcttcaatttactgaactgtaaaatgaggcacatgttacctgatttartttttaaaattgtattatattgtgttttatttcaataggttttggggaacaggtggtttttggttacatggataagctctttagtggttacttctgagat

SEQ ID NO: 19358 - DNA, 201 bp, Homo sapiens
ccatgctggtcgttcctctgatagccccggggtccaagaagctcctaggttctttctccggctcagtgcttcccccaggcgtctccctcgtcggactcctsgtccctcccttaaaattgccggtgagtcgtcttccttgctggaaaagaattagggttatgatgattttgagggcaaatcagtgactttgtccccctcccc

SEQ ID NO: 19359 - DNA, 201 bp, Homo sapiens
cattgctctaaggaatcatacaaacaccactacggtacccattgttgtaatatttaaaaatctgtatttgaaacacacagacaatattctagactacatgmagtttccctctgtacttcagtaacacagagttgatttagttcctgtttggatggtcagaatttcaaggtttccaaatcgaaaagctagactaccagcttt

SEQ ID NO: 19360 - DNA, 201 bp, Homo sapiens
cactggcatctagtaggtcagcgatgctgctaagcatcctgcagtgcccaggacagccccacaaagactcatccagcctgaatgtcaatagtgctgaggtygaggagccttactttacgggaactaggcaggaggagtctgtatgcccaaggacgttggtcattatcacgtgtccacttcagtacagcactactcagaggc

SEQ ID NO: 19361 - DNA, 201 bp, Homo sapiens
cattctaggttcaatagaatttcttttctattagctcataagcatttaaaaaggcaacaccttcttgtattcatatgtgtccagaaagtatggcccataaragttatttaggtaaggatgaagaatttacacttgggacttgaagcagcttcactcctgtgaagaggagatgtatcttgacatcaagccacatctctgaac

SEQ ID NO: 19362 - DNA, 201 bp, Homo sapiens
tatgtgggtttgcagtagaatttactttcaagtcagctccaccaggaatagtttaaagatctcataggcatctgtaaagaataacaaacgttgcctatatktacagccatacagtcttatttttaaggtttgatctatgcaaatacagtattatatatacttcatgtaatgtgtaacatgtagattataaagtatatgaat

SEQ ID NO: 19363 - DNA, 201 bp, Homo sapiens
ccgtgcccagccagtttttgaaattaggcattttattaggaaaagccgtataaatggttatgtgggtttgcagtagaatttactttcaagtcagctccacyaggaatagtttaaagatctcataggcatctgtaaagaataacaaacgttgcctatatttacagccatacagtcttatttttaaggtttgatctatgcaaa

SEQ ID NO: 19364 - DNA, 201 bp, Homo sapiens; identical to SEQ ID NO: 4970

SEQ ID NO: 19365 - DNA, 201 bp, Homo sapiens
caacagttgcattgctttgtatgtatcccttcactgctcactccactgtcctgttcctctttcttcctccccagtggtaaccattattctgaatttacaakttcttcattctactgacaagaatactgaggcctggagagattgagtgatttgctcaaggccacagaatctgtttatgtcacatttgggactaaaaaccaa

SEQ ID NO: 19366 - DNA, 201 bp, Homo sapiens
atcctgaatccacccttgtttatatatcatccttgaaagtgacttatcatcgctgagtctcagcttcctcattcataaagtaggaagaaatatatataatrtgtatcaaatagcttgtatactgcctgacacagaataggcattcagaatggtagctgtgctttccttcttatttctcttcctttcttccctgctccttca

SEQ ID NO: 19367 - DNA, 201 bp, Homo sapiens
aacactgaaaattttggtcatcttatctgggacagtcttaattcagtgatttttcaaccaggggaaattctgccccctaggggacattttcattgtcacarctggggtactgtcatctagtggatagtctggggggttttgtctaggatgaggaggaagatgaaagagggtcggtttggaaaggaagaattcagtgcattc

SEQ ID NO: 19368 - DNA, 201 bp, Homo sapiens
aagactgagataatatatgtgaaattctgccataaagaaagtgattacgtattttcattcaagagcacaggctttggagtcagaaagagctggctttgaaycctgaatccacccttgtttatatatcatccttgaaagtgacttatcatcgctgagtctcagcttcctcattcataaagtaggaagaaatatatataatgt

SEQ ID NO: 19369 - DNA, 201 bp, Homo sapiens
gttgagaagacgttaaagatgctttagaaactaactgctcccttgtccttgcttccaggcccgcaatggatgccctgcaactagcaaattcggcttttgcygttgatctgttcaaacaactatgtgaaaaggagccactgggcaatgtcctcttctctccaatctgtctctccacctctctgtcacttgctcaagtgggtg

SEQ ID NO: 19370 - DNA, 201 bp, Homo sapiens; identical to SEQ ID NO: 4921

SEQ ID NO: 19371 - DNA, 201 bp, Homo sapiens
atcattggttattccaggaacccatctctcaagcagcagctcttctcctatgcgattctgggctttgccctgtctgaggccatggggctcttctgtttgayggtcgccttccttatcctcttcgccatgtgaagctctgtgggggtcacctgcctgtccctgctgctgcggctgcacaccattcttggtgctgggctgtgc

SEQ ID NO: 19372 - DNA, 201 bp, Homo sapiens; identical to SEQ ID NO: 4923

SEQ ID NO: 19373 - DNA, 201 bp, Homo sapiens
ctaaaggtgacactgcaaatgaaattggacaggtaagccccaaaaccttgtttctactttaagtgggaatacagttattagaacccataggcagtgcctayggaaaaaaggaatgtagactttgtggccagaattggtcaagattcagaactgtgccattccaggactctcttaatcttttttttttttttttttttttgt

SEQ ID NO: 19374 - DNA, 201 bp, Homo sapiens
aattaattttccttcaggaaatcagtcatctctggagcagagacaggaggccaggtgttaataggagcaaagagaagaaaaggcctgggcagtgcttggasataaaagacctgaacgatcagacccttccatgggctccctttaagaagagcagggagagaccaagggctaaagttgggagactgagaaaatgcagcccac

SEQ ID NO: 19375 - DNA, 201 bp, Homo sapiens
ttgtttaaatagaattcttatagtgttggcagaatgcagttgagaagacgttaaagatgctttagaaactaactgctcccttgtccttgcttccaggccckcaatggatgccctgcaactagcaaattcggcttttgccgttgatctgttcaaacaactatgtgaaaaggagccactgggcaatgtcctcttctctccaat

SEQ ID NO: 19376 - DNA, 201 bp, Homo sapiens
ctaggcagagctggacacacagaggacctcacatgccttcagacatttgcctggaagtttcttcacaactgatcttacttttgaatttacagaaagttccytgtttcttctgagatcaattactttgtttaaatagaattcttatagtgttggcagaatgcagttgagaagacgttaaagatgctttagaaactaactgct

SEQ ID NO: 19377 - DNA, 201 bp, Homo sapiens
agctctgctggagagaggtattggggaaggttcagcttagtatttgaagataccagatgcaagtttactggagtattatccttgcaggcttgatatgaagyttgaaatttctccccaaagagatttagttaacaggcaaatatcccatgggaggtatatgtcaataggttatacaacattactgtcagtcttttacaactt

SEQ ID NO: 19378 - DNA, 201 bp, Homo sapiens
tatctgttaacctccaaagtagtatgttttcctataattctgtttttggttacacatagagttgaagtcttccattatttatcagccaaatattcagtgasaaactacaagctggggtagaaaatgagacttagtttctgccttgactgtattctagttggggtgggaagtggaaagacaatcactagataatatttctaa

SEQ ID NO: 19379 - DNA, 201 bp, Homo sapiens
aggttcttcattttgaaaatgtcaaagatgtaccctttggatttcaaacagtaacatcggatgtaaacaaacttagttccttttactcactgaaactaatmaagcggctctacgtagacaaatctctgaatctttctacagtaagttgtttaaagcaagtagcaagacttaactttttacaaggagtggcattttcatgct

SEQ ID NO: 19380 - DNA, 201 bp, Homo sapiens
gccactgcactccagcctgggtgacaaagtgagactccatctcaaaaaaaaaaaaaaaaaaaaaaaagaaatgggtaaagtacctcttttgtaaatgagaycaaggaactgagactggaaatttgacccattttattggaaaacccagacatctatatgatgatgtgatgtggtctccgtgggtgggatctgacttgtgtt

SEQ ID NO: 19381 - DNA, 201 bp, Homo sapiens
gtgtatatataggtgtatgtatatatgtatgtgtatctgtatatatataggtgtaggtatatatgtatgtgtgtctgtatatatacatgtgggtatatatrtgtgtgtgtgtgcgcgcgtgtgtgtatatatatatatatatatatttatgcatgtgtaaattgaaaagtaagcagtccaaattttcccttttacagacag

SEQ ID NO: 19382 - DNA, 201 bp, Homo sapiens
gtgtatgtatatatgtatgtgtatctgtatatatataggtgtaggtatatatgtatgtgtgtctgtatatatacatgtgggtatatatgtgtgtgtgtgtgcgcgcgtgtgtgtatatatatatatatatatatttatgcatgtgtaaattgaaaagtaagcagtccaaattttcccttttacagacagacaccaaaccag

SEQ ID NO: 19383 - DNA, 201 bp, Homo sapiens
tttagggtttctttctggctatggttgattatctagctttgtaaagttcttagaccttcaaatgagacaattttcctgattgttccgttttaagtcctcakgtacttttacataataggtgaatgttcttctaattctatttcattattactcttatgctaatcattctaggttcaatagaatttcttttctattagctca

SEQ ID NO: 19384 - DNA, 201 bp, Homo sapiens
tgtatgtatatatgtatgtgtatctgtatatatataggtgtaggtatatatgtatgtgtgtctgtatatatacatgtgggtatatatgtgtgtgtgtgtgcgcgcgtgtgtgtatatatatatatatatatatttatgcatgtgtaaattgaaaagtaagcagtccaaattttcccttttacagacagacaccaaaccagt

SEQ ID NO: 19385 - DNA, 201 bp, Homo sapiens
ttcaaatgagacaattttcctgattgttccgttttaagtcctcatgtacttttacataataggtgaatgttcttctaattctatttcattattactcttaygctaatcattctaggttcaatagaatttcttttctattagctcataagcatttaaaaaggcaacaccttcttgtattcatatgtgtccagaaagtatggc

SEQ ID NO: 19386 - DNA, 201 bp, Homo sapiens
tataaattgtaatagctgcttgtagtttcttactcatatgctgtacactttttcttatggcttcatttaagcatatcatactaaaaaccaacatgccaggytattccagagacttgtaaccagatcctcagagctgggggctcttagacatatttcagcccagccccctcattctgtagatgaggagcagaactcacagag

SEQ ID NO: 19387 - DNA, 201 bp, Homo sapiens
tatgtatatatgtatgtgtatctgtatatatataggtgtaggtatatatgtatgtgtgtctgtatatatacatgtgggtatatatgtgtgtgtgtgtgcgygcgtgtgtgtatatatatatatatatatatttatgcatgtgtaaattgaaaagtaagcagtccaaattttcccttttacagacagacaccaaaccagtgc

SEQ ID NO: 19388 - DNA, 201 bp, Homo sapiens
ccttcttgtattcatatgtgtccagaaagtatggcccataagagttatttaggtaaggatgaagaatttacacttgggacttgaagcagcttcactcctgygaagaggagatgtatcttgacatcaagccacatctctgaactgcgcaactccactatccctacccaatctcccattcctcatttctcatctaccattaga

SEQ ID NO: 19389 - DNA, 201 bp, Homo sapiens
tgtatatatgtatgtgtatctgtatatatataggtgtaggtatatatgtatgtgtgtctgtatatatacatgtgggtatatatgtgtgtgtgtgtgcgcgygtgtgtgtatatatatatatatatatatttatgcatgtgtaaattgaaaagtaagcagtccaaattttcccttttacagacagacaccaaaccagtgcag

SEQ ID NO: 19390 - DNA, 201 bp, Homo sapiens
cacagcatggccattatgagttatggagcgaggagggtgtcatcttatgctgacattacatgttgtggtgttgcaaggcagaaaagatgctggactattgsttggaacaataaaaaaaaaaaaggaaaaaaatacaatgatttaagccctccaaatgatagtatcctggttttaaatggcttacaatattattacaagaat

SEQ ID NO: 19391 - DNA, 201 bp, Homo sapiens
gtatgtgtatctgtatatatataggtgtaggtatatatgtatgtgtgtctgtatatatacatgtgggtatatatgtgtgtgtgtgtgcgcgcgtgtgtgtrtatatatatatatatatatttatgcatgtgtaaattgaaaagtaagcagtccaaattttcccttttacagacagacaccaaaccagtgcagatgatgaac

SEQ ID NO: 19392 - DNA, 201 bp, Homo sapiens
gcgaggagggtgtcatcttatgctgacattacatgttgtggtgttgcaaggcagaaaagatgctggactattggttggaacaataaaaaaaaaaaaggaamaaaatacaatgatttaagccctccaaatgatagtatcctggttttaaatggcttacaatattattacaagaataattaacagtttgaatccatataatat

SEQ ID NO: 19393 - DNA, 201 bp, Homo sapiens
cctcctaggcagttaaggcactacgttgctacgcactgccaggtccactatcatgtgacctgatgtcaagcatcctctctcttgctctttctttttttttwaaattagtagatgttatttttagagtagatctatgcctacagaaaaataagcagaaagtacaaggagttcccatatactccccttcccgtcccaggccta

SEQ ID NO: 19394 - DNA, 201 bp, Homo sapiens
tttttctttccattttatgctttgatctttcagccattatccagctgtcttggattttacctttcgttcttaaaacgccctccaataaacatcaattattttcttcttcttcttctttttttatttcaataatttatttttcttttttttaattatacattaagttttagggtacatgtgcacaatgtgcaggtttgttac

SEQ ID NO: 19395 - DNA, 201 bp, Homo sapiens
ttttctttccattttatgctttgatctttcagccattatccagctgtcttggattttacctttcgttcttaaaacgccctccaataaacatcaattattttcttcttcttcttctttttttatttcaataatttatttttcttttttttaattatacattaagttttagggtacatgtgcacaatgtgcaggtttgttaca

SEQ ID NO: 19396 - DNA, 201 bp, Homo sapiens; identical to SEQ ID NO: 4971

SEQ ID NO: 19397 - DNA, 201 bp, Homo sapiens
tttctttccattttatgctttgatctttcagccattatccagctgtcttggattttacctttcgttcttaaaacgccctccaataaacatcaattattttcttcttcttcttctttttttatttcaataatttatttttcttttttttaattatacattaagttttagggtacatgtgcacaatgtgcaggtttgttacat

SEQ ID NO: 19398 - DNA, 201 bp, Homo sapiens; identical to SEQ ID NO: 4973

SEQ ID NO: 19399 - DNA, 201 bp, Homo sapiens
ggcattccctaaggactggttataccaaatacttgagagatgtttttcaccatgtctttccatctttaaaatgaggcaggccaggctaaatgatatctacratactctgacacagtaaaaacgtagttttttttttttttttcttgagatggagtcttgctttgtcacccaggatggagtgcagtggcacgatcttggctc

SEQ ID NO: 19400 - DNA, 201 bp, Homo sapiens
ggctgagtctggctgtaagtttactgcttggcaacagtgggctgggtcagtggtcaagatcaggcttctaaagagacaggagcagctatgatgcttcagarcaaagcagacgcccccctgccatgggaaattaaagcaattactaatagctgtattgtactttcttgcccacaaagcacttttcatatacattgattcact

SEQ ID NO: 19401 - DNA, 201 bp, Homo sapiens
agttccttttactcactgaaactaatcaagcggctctacgtagacaaatctctgaatctttctacagtaagttgtttaaagcaagtagcaagacttaactytttacaaggagtggcattttcatgctgttagacctacaactttttttcagtgaaattcctttctaggatgttcacttgtgatttgaggctttaaataaat

SEQ ID NO: 19402 - DNA, 201 bp, Homo sapiens
catagagtgacccttctggctcctttgattagtgattggctctcctccatagcaagggctggcaaagggttcctaactctgtttaagtgaaatctgaaacrggttgccaatggtgcctctcttcaagaccccagagccagcctggaaggaacaccatgaaaatgttgcaatagtcaatgagtagaatgtggacttttgtgt

SEQ ID NO: 19403 - DNA, 201 bp, Homo sapiens
tgctttccttcttatttctcttcctttcttccctgctccttcattctcctctgctgacctctttggtagatctggttgtgtcaaggtagaaggagagaaargagtccttctgaaatttgatggttggaaccatcaggccttacatggtgtgactccatgaagtggtaaatactcagtgaatatgcatgtgaatttcagatg

SEQ ID NO: 19404 - DNA, 201 bp, Homo sapiens
tatcacgtgtccacttcagtacagcactactcagaggcaatgctttttgggtaacggatttttctcttaacaggttcttcattttgaaaatgtcaaagatrtaccctttggatttcaaacagtaacatcggatgtaaacaaacttagttccttttactcactgaaactaatcaagcggctctacgtagacaaatctctgaa

SEQ ID NO: 19405 - DNA, 201 bp, Homo sapiens
ttgcaggttcatggattacttctctataaaaaatatgtatttaccaaaaattttgtgacattccttctcccatctcttccttgacctgcattgtaaatagsttcttcttgttctgagattcaatattgaatttttcctatgctattgacaataaaatattattgaactacatgtcttgttttttttttcctattaagttag

SEQ ID NO: 19406 - DNA, 201 bp, Homo sapiens
agccttactttacgggaactaggcaggaggagtctgtatgcccaaggacgttggtcattatcacgtgtccacttcagtacagcactactcagaggcaatgytttttgggtaacggatttttctcttaacaggttcttcattttgaaaatgtcaaagatgtaccctttggatttcaaacagtaacatcggatgtaaacaaac

SEQ ID NO: 19407 - DNA, 201 bp, Homo sapiens; identical to SEQ ID NO: 4928

SEQ ID NO: 19408 - DNA, 201 bp, Homo sapiens
tttctgaatcagaaacaaaagaatgtcctttcagagtcaacaaggtatgtggggcagcatgtagcagtaaaaggagcccaattatagatgtgaaaaatgayagggacagagtggggcataaatccattccaatgaggaacctgagggcacggccggcaaagtgcctttcctgagatgaacagctggaaggtaagtggtaca

SEQ ID NO: 19409 - DNA, 201 bp, Homo sapiens
aattaaatactaatatgaataatatatatattaaaaaacattttctaaagtgaaaaaatgtaatgagaagagtgatattgtttttcatttttgcaaatctccttaatatttggcttaatagaagggatgtcatatagcctctggaaaactccgctgtctattagagattgagaatgataatgtcttagtattatcatgaga

SEQ ID NO: 19410 - DNA, 201 bp, Homo sapiens
tgcacacattcttctgatgtttctcaaaatcagtaagaaaaataataactatgaattcacaattttcatcagtcacaaattagttttgttggctgggctgrtcagatggggatctccacaggcagctctggttatataagtttagccattgctctaaggaatcatacaaacaccactacggtacccattgttgtaatattt

SEQ ID NO: 19411 - DNA, 201 bp, Homo sapiens
atgtgtctttatagcagcatgatttataatcctttgagtatacacccactaatgggatggctgggttaaatggtatttctagttctagatccttgaggaaytgccacactgacttccacagtggttgaacttgtttacggtcccaccaacagtgtaaaagtgttcctatttctccatatcctttccagcacctcttgtttc

SEQ ID NO: 19412 - DNA, 201 bp, Homo sapiens
ctttagtttaattagatcccatttgtcaattttggctttcaattattttcttcttaaagtatagaactaaagaaaatgaccttttgagttttggaaatgattttttttttttttttgagatggagtcttgctctgtcccccaggctggagtgcagtggcatgatctcagctcactgcaagctccgcctcctgggttcatgc

SEQ ID NO: 19413 - DNA, 201 bp, Homo sapiens
gataagctatccgtgttgcaggttcatggattacttctctataaaaaatatgtatttaccaaaaattttgtgacattccttctcccatctcttccttgacmtgcattgtaaataggttcttcttgttctgagattcaatattgaatttttcctatgctattgacaataaaatattattgaactacatgtcttgtttttttt

SEQ ID NO: 19414 - DNA, 201 bp, Homo sapiens
cgcccagccgcatctctctcattttttaaaacagctaaaatggatgcattcactacctatgaccctagggcatggctcagagttagttcaaattcccattaaaaaaaaaaagtaactttagctttaatttaattttctaaatctgatgccattcctagtacatgaatattctggatttcctcgtagagaaattacaataag

SEQ ID NO: 19415 - DNA, 201 bp, Homo sapiens; identical to SEQ ID NO: 4916

SEQ ID NO: 19416 - DNA, 201 bp, Homo sapiens; identical to SEQ ID NO: 4917

SEQ ID NO: 19417 - DNA, 201 bp, Homo sapiens; identical to SEQ ID NO: 4918

SEQ ID NO: 19418 - DNA, 201 bp, Homo sapiens; identical to SEQ ID NO: 4919

SEQ ID NO: 19419 - DNA, 201 bp, Homo sapiens; identical to SEQ ID NO: 4920

SEQ ID NO: 19420 - DNA, 201 bp, Homo sapiens
gggtctcctgagtcacataccaaaaacttctgggccatctttgatgttccacccagactgctttgaagctgggcttatcataacaccttatgttttcaatygagccaggtcttttacagttggaaataaataaaaataatttcttttcatttttgtccttcagattgaaaaacaactcaactcagagtcactgtcacagtg

SEQ ID NO: 19421 - DNA, 201 bp, Homo sapiens
tggggaggaggaggacacagctgggtggctgctgggtctcctgagtcacataccaaaaacttctgggccatctttgatgttccacccagactgctttgaarctgggcttatcataacaccttatgttttcaattgagccaggtcttttacagttggaaataaataaaaataatttcttttcatttttgtccttcagattga

SEQ ID NO: 19422 - DNA, 201 bp, Homo sapiens
agatcctggaaactcagcctttatgaacagaattaataaaagtttgaaatgtcattgatctctcagtgtttcacttgataaagcaataaaatgctattcayagctgcatgaggctacacccttcttttgaatgcagatgctattacttctcctttgttttctttgaattgctttgtccaccctagaactttttgagtgaca

SEQ ID NO: 19423 - DNA, 201 bp, Homo sapiens
ttagtagagacgggctttcactgtgttagccaggatggtctcgatctcctgacctcgtgatccacccacctcggcttcccaaagtgctgggattgcaggcrtgagccactgcgcccagccgcatctctctcattttttaaaacagctaaaatggatgcattcactacctatgaccctagggcatggctcagagttagttca

SEQ ID NO: 19424 - DNA, 201 bp, Homo sapiens
aaaagggacataggcaacatatgtaaaagaaaaaccggctggacgcggtggctcacgcctgtaatcccagcactttgggaggccaaggcgggcggatcacraggtcaggagatcgagaccatcctggctaacacggtgaaaccctgtctctactaaaaatacaaaaaattagccgggcgtggtggcgggcgcctgtagtcc

SEQ ID NO: 19425 - DNA, 201 bp, Homo sapiens
tttcactgggagaagacaatgatgactgttactgctccttaccaactcaaaatatccatgggagctgagggatgggtaggaggtcctcctaacttcctgartttagcttcccaactgcagtggtcttctcaaagctgactgcagagacaggattgaccctgcacacaagaggtctgtctgagattctagagacatagctta

SEQ ID NO: 19426 - DNA, 201 bp, Homo sapiens
ccgaatctagtcatgaaagaatgaagcctaggcagtcgctgctgtctagggagggatacacttccggggcaagggagacccacttcctgcgagaatgactrgcgcccccagctactctgtctctgtactgactgaggaagttctaacaggacagtaactgcaggatgagaacatgggaagaacagggtctctggagtcatt

SEQ ID NO: 19427 - DNA, 201 bp, Homo sapiens
ccttttgttagaagagaataacaatgcaatagcttgactacagactctgattttatgaactgcatgtttttcaggagttcatcagctctacgaagagaccstatgcaaaggaattggaaactgttgacttcaaagataaattggaagaaacgaaaggtcagatcaacaactcaattaaggatctcacagatggcaagtacc

SEQ ID NO: 19428 - DNA, 201 bp, Homo sapiens
ctgacaaattttacaaatttgttaaggaaaaagggacataggcaacatatgtaaaagaaaaaccggctggacgcggtggctcacgcctgtaatcccagcaytttgggaggccaaggcgggcggatcacgaggtcaggagatcgagaccatcctggctaacacggtgaaaccctgtctctactaaaaatacaaaaaattagc

SEQ ID NO: 19429 - DNA, 201 bp, Homo sapiens
agcctttatgaacagaattaataaaagtttgaaatgtcattgatctctcagtgtttcacttgataaagcaataaaatgctattcacagctgcatgaggctmcacccttcttttgaatgcagatgctattacttctcctttgttttctttgaattgctttgtccaccctagaactttttgagtgacattactaaaccttttc

SEQ ID NO: 19430 - DNA, 201 bp, Homo sapiens
ttcttaaactagagagagtgtgagcatcaaccacccaatgtgcagtttccacctccgccccagcacattcccaggagagcaggggagcaggagatgagctrtcctgcagtaagtcctggccaacgccctttgataggttccatctcacctaatcctcctgtctccttcgagggaggctggatgagggattcaatagacagg

SEQ ID NO: 19431 - DNA, 201 bp, Homo sapiens
aggggaggtgaagcatggggagcggctcacataccctaatgccacccctccaccctccaacccccaaacttctttcctgtggtcagtatctgccagcactwactgaggatccatcatgtcccaggcagtttacacacattatcactaatcctttctgctcagcgcaaccaaccagccacagaggcctccacctgccctgca

SEQ ID NO: 19432 - DNA, 201 bp, Homo sapiens; identical to SEQ ID NO: 4986

SEQ ID NO: 19433 - DNA, 201 bp, Homo sapiens; identical to SEQ ID NO: 4984

SEQ ID NO: 19434 - DNA, 201 bp, Homo sapiens
gcaggaggactttccaggtgaggaggagaagtgacaaagacttggcataggattttggaaaacattgccaacctttcctccggtcctacaggaaaccagaygaatttttgaattgtttcatatgccaacatatttggtgctgttttttaagcttaattttgttttttatgcttaattttgttttttacaatacaacatcag

SEQ ID NO: 19435 - DNA, 201 bp, Homo sapiens
tccaccaggtctgccggaagagctcatccagaaggggaaggatatcaagggggtgtcggaaatcgtgcagaatgggaagcacttcaagttcaccatcaccrctgggtccaaagtgatccaaaacgaattcacggtgggggaggaatgtgagctggagacaatgacaggggagaaagtcaaggtaggagggcatcccttctg

SEQ ID NO: 19436 - DNA, 201 bp, Homo sapiens
cccacctctgcccatatctaaacctcagacggtttccaccaggtctgccggaagagctcatccagaaggggaaggatatcaagggggtgtcggaaatcgtkcagaatgggaagcacttcaagttcaccatcaccgctgggtccaaagtgatccaaaacgaattcacggtgggggaggaatgtgagctggagacaatgacag

SEQ ID NO: 19437 - DNA, 201 bp, Homo sapiens
ctcccacctctgcccatatctaaacctcagacggtttccaccaggtctgccggaagagctcatccagaaggggaaggatatcaagggggtgtcggaaatcvtgcagaatgggaagcacttcaagttcaccatcaccgctgggtccaaagtgatccaaaacgaattcacggtgggggaggaatgtgagctggagacaatgac

SEQ ID NO: 19438 - DNA, 201 bp, Homo sapiens
caatacaacatcagatgaacacttcataatttcttttctggctttcagaccatgacattgggtgacattgtcttcaagagaatcagcaagagaatttaaasaagtctgcatttcatattattttagtgtgtaaaattaatgtaataaagtgaactttgttttaaaaaaaaatgtcttctcaatgccttttcattgatggtg

SEQ ID NO: 19439 - DNA, 201 bp, Homo sapiens
acggttcttcaggccagaagagtgtcctttttataaattgactggcaagatagcagcaggccaggccaggtcactgtcccttcctttctgaggccacagcygatgctgctgacaagcccccagtgagtttctgtggccccttgggagacacagtgcccttctctgtccctccatgtcatgtcgtttctctcacctacctac

SEQ ID NO: 19440 - DNA, 201 bp, Homo sapiens; identical to SEQ ID NO: 4985

SEQ ID NO: 19441 - DNA, 201 bp, Homo sapiens
gttggtggtgctctgagcgtgtggctcccagtgcttgaggggagaggggaggtgaagcatggggagcggctcacataccctaatgccacccctccaccctycaacccccaaacttctttcctgtggtcagtatctgccagcacttactgaggatccatcatgtcccaggcagtttacacacattatcactaatcctttctg

SEQ ID NO: 19442 - DNA, 201 bp, Homo sapiens
gggggtgaatggtgcagtgtttctcctgcaggtatgtccccctgactcttctttgcccccagaatatgctttagggagtcacagacaacagaacactgccycagggcgctgtcatcactctattcaaatggaaaaattcttaaactagagagagtgtgagcatcaaccacccaatgtgcagtttccacctccgccccagca

SEQ ID NO: 19443 - DNA, 201 bp, Homo sapiens
tccaccctccaacccccaaacttctttcctgtggtcagtatctgccagcacttactgaggatccatcatgtcccaggcagtttacacacattatcactaaycctttctgctcagcgcaaccaaccagccacagaggcctccacctgccctgcatgcccagggtgcttcataaatgcctttgcccatttagcgtttataaag

SEQ ID NO: 19444 - DNA, 201 bp, Homo sapiens
ataaagagaatcccattcatggtcatattatggcagcttacaagcctggcacagtccagttatgcagtcagccttggtgcctggctgccagccacatcctrtaccctatttgggggtgaatggtgcagtgtttctcctgcaggtatgtccccctgactcttctttgcccccagaatatgctttagggagtcacagacaaca

SEQ ID NO: 19445 - DNA, 201 bp, Homo sapiens
tggcaagatagcagcaggccaggccaggtcactgtcccttcctttctgaggccacagccgatgctgctgacaagcccccagtgagtttctgtggccccttkggagacacagtgcccttctctgtccctccatgtcatgtcgtttctctcacctacctaccacggtcatgaaactcccacctctgcccatatctaaacctca

SEQ ID NO: 19446 - DNA, 201 bp, Homo sapiens
tctgcaggcaagccataccacctctgtgtctctcatctctccctcatgcaacaggaccctctgtgctcactgtccacccacaaaatttttgtgaacctcawtttgtataacagcatagacaagttctgaaactggtaaagctctatcccagggcaagggattgctggtatgtcttcctccagagccttgactgcagaggtg

SEQ ID NO: 19447 - DNA, 201 bp, Homo sapiens
ttttgtacaggtgcccagagaactttgggccggaagcctgcttaaataaatggaataaacagctgttgatggtgtgggctatttttaccttgacccctccygcacttcgggaccctccacgcctcctctctgcctgtcctgtgggcatcccaccaacagaaagtgctgtttcccggtgacagaccattaatttgcaaagag

SEQ ID NO: 19448 - DNA, 201 bp, Homo sapiens
gactctagaggacttaaaaattgacgtagcaaggcttgctttcaagggactcaccccgttaggggagtggggctcacaatgtctgagctgatgtttaccarggaggccatgtggatgggggtaggttcgctgtcagagactgggagtctctggcctcctctagctctcacactcagggtgctgggcctggtgacctcctgg

SEQ ID NO: 19449 - DNA, 201 bp, Homo sapiens; identical to SEQ ID NO: 5005

SEQ ID NO: 19450 - DNA, 201 bp, Homo sapiens; identical to SEQ ID NO: 4991

SEQ ID NO: 19451 - DNA, 201 bp, Homo sapiens
cccacctcggcctcccaaagtgctgggattacaggcatgagccactgtgcccaaccaagaatgtttttttacacctctttgtttaactgtatggctatackcacacactcgcgtgttctgaaaacaagtgcacacgtcgcgtgtgttacctttgggtggaaggtgagaaggcaagcacgtcctccattcctggatagttca

SEQ ID NO: 19452 - DNA, 201 bp, Homo sapiens
tagaccccaaataccatcccaagattatcgggagaaagggggcagtaattacccaaatccggttggagcatgacgtgaacatccagtttcctgataaggaygatgggaaccaggtgagagcctcggttggagcgtgtcgggggcagaggtgcttgttgacctttcctgtgacttgggagcagtaaccagatgtgcctagat

SEQ ID NO: 19453 - DNA, 201 bp, Homo sapiens
accacccagcacccagcaggtgcctcacagacatatgcattctgaacaaggtgtggggtctcttccagcagctgtcagctgtcccttttcccctttctctstagttcacagtacagagccagttgtccaggagaatggggacgaagctggggaggggagagaggctaaagattgtgaccccggctctccaaggaggtgtga

SEQ ID NO: 19454 - DNA, 201 bp, Homo sapiens
acgtaacacatagctgcaggccaggcgcagtggctcacacctgtaatcccagcactttgggaggccaaggcaggcagatcactgaggccaggagttcaacrccaacctggccaatgtggtaaaatcctgtctctacaaaaaaatatacaaaaattagccaggcatagtggcgcacacctgtagtccagctacttgggaggc

SEQ ID NO: 19455 - DNA, 201 bp, Homo sapiens
gttacgttattgggcagaaaggaagtgggatccgcaagatgatggatgagtttgaggtagacccctttcccgggaggccatgtcacaggagtggcctgtcrcatcctctcccgagtgccagtgtcctttctcaacttcctgttgactctgcctcctcctgctcggactgggcactgacttcccttcacggcgggtggcctt

SEQ ID NO: 19456 - DNA, 201 bp, Homo sapiens
ggtgcagatacactcgaacttaccctaacctgggagtcagggcaaccttccccaagcatgtgatgtttaagctcatgctgttttaatggatgagttggtgytgctgggcaggaataagcaaagatggtgtttctgccagaatgtcttggaaaaatatgctccttcagaacctacaaatattcttgttttcttttattctct

SEQ ID NO: 19457 - DNA, 201 bp, Homo sapiens
aaaaaaaaaaaaaaaagaaagaaagaaataggccgggcgcggtggcttatgcctgtaattccagcactttgggagacaggcgggtggatcacggtgtcagragtttgagaccagcctggccaacaatgtgaaaccctgtgtctactaagaatacaaaaatcagccaggtgtggtggcgcacgcctgtagtcccagctactc

SEQ ID NO: 19458 - DNA, 201 bp, Homo sapiens
tctgttttagctatctctttggttttggtgtggtaggttcacatcgagttcacagagggcgaagacaagatcaccctggagggccctacagaggatgtcartgtggcccaggaacagatagaaggcatggtcaaagatttggtaaggtaccccttggaatgttgtgtgtgctggtgacaagggaggctctgagttgggcat

SEQ ID NO: 19459 - DNA, 201 bp, Homo sapiens
tctgctctcagctcccacggcctaaccatgaccatcctccctgcaggcattggttcctgtcaccattgaagtagaggtgccctttgaccttcaccgttacrttattgggcagaaaggaagtgggatccgcaagatgatggatgagtttgaggtagacccctttcccgggaggccatgtcacaggagtggcctgtcgcatcc

SEQ ID NO: 19460 - DNA, 201 bp, Homo sapiens
aaagtgatgttacgatttatggatacaataaataataaaatcaagttaacataattcatcacttcaaatactttaagttttttgtggtgaaagcatatgarattactgtcagcacttttgaaatcgacattattatttactatattcaccgtgctgtacaatatatctcataaaagaaaaccacattcctcctgtctaatt

SEQ ID NO: 19461 - DNA, 201 bp, Homo sapiens
caaattgggttcaaatgatccttctgcctcagtctcctgagtaactaggattacaggcacaggctaattgtttttattttttatttttttaagaaatgagktctcactttgttgcccaggctggtctcaaacttttggcctcaagtgatccttctgccttggcctcccaaagtgctaggattataggcatgagtcaccatg

SEQ ID NO: 19462 - DNA, 201 bp, Homo sapiens
atgttacgatttatggatacaataaataataaaatcaagttaacataattcatcacttcaaatactttaagttttttgtggtgaaagcatatgagattacygtcagcacttttgaaatcgacattattatttactatattcaccgtgctgtacaatatatctcataaaagaaaaccacattcctcctgtctaattgatgtt

SEQ ID NO: 19463 - DNA, 201 bp, Homo sapiens
gtgcctctttcttagccagtaacaccaagtgctaattaccattgctttgtagtatgctttgctaattttagttgaatcccagcttttttttttttttttttgcaaaattttctagcctggttttatgtttaggtgaatttttaggagaatccttgttagagttaaaaaaatatcctactgggatgttgtgttactttccca

SEQ ID NO: 19464 - DNA, 201 bp, Homo sapiens
ctttggtttaagggaattttgagactggtttaatcttctagccagaccactcaaactttctccttatcagcgataaggctgtttcgctctcttaccatttrtgtgttcactggagtagcacttttccttcagccttttttctttgcattcacagcttggctatttggtgcaagaggcctagcttttggcgtgtcttagctt

SEQ ID NO: 19465 - DNA, 201 bp, Homo sapiens
gaatggtcagtgttatctgccatccctctcctatattgatgtttatttccaaattagggtgtttagttttcctttctttttttttttttttttttttttttgagacggagccaggctggagttcagtggtgccatcttggctcactgcaacctctgcctcctgggttcaagtagtgattctcctgcctcagcctcccgagt

SEQ ID NO: 19466 - DNA, 201 bp, Homo sapiens
tgaggcaggaatatcacttgagcccaggaagtcaaggctgcagtgagctgtgattgtatcgtgccactgcattttagcctgggtgacagagcaagaccctrtctcaaaacacatatatatggaagtacagtagtgtaaatctaacattaatttctggtttctgcccccgagaaattgcagaatgtagcttagtcagtcatg

SEQ ID NO: 19467 - DNA, 201 bp, Homo sapiens
aatttgggttttgactttgaactggaatggtcagtgttatctgccatccctctcctatattgatgtttatttccaaattagggtgtttagttttcctttcyttttttttttttttttttttttttgagacggagccaggctggagttcagtggtgccatcttggctcactgcaacctctgcctcctgggttcaagtagtga

SEQ ID NO: 19468 - DNA, 201 bp, Homo sapiens
ttttcttctcatgcagttcctaactcttgtcttctttcgtaatctaaaaaaacctgctgcccagctcccatgtcctctgcttctcttgtcttgtgttgctycacctggcacagctgcatgtccatgttcccccctcagtgcatcgcctcgttgctgcctctgcgtgtgcatgtgtttgggatggacgcacaaaaagccctc

SEQ ID NO: 19469 - DNA, 201 bp, Homo sapiens
gattgtgaccccggctctccaaggaggtgtgacatcatcatcatctctggccggaaagaaaagtgtgaggctgccaaggaagctctggaggtatgtgtccrtgtgcccccctccaccccccgccaaggcccagtcagcaggcacctggggagacgcgtggcctggatgggatggacggttgcccaagcggcagtggcagtg

SEQ ID NO: 19470 - DNA, 201 bp, Homo sapiens
aactcctgggctcaaatgatccttttgcctccgcctcctgagtagctgggaagcatactacaggcactgtacctggctaattaaattttttttttttttttgtagagatgggagttgtggggggtctcactctgttttgctatattgcccaagctgatcttgaacttccgacctcaagcagtcctcccacctcggcctccc

SEQ ID NO: 19471 - DNA, 201 bp, Homo sapiens
tggacttgggcatgagcctgtctgattccagagatcatccccctgttctctgtcacatccattcatggtgtttttcactgggccttgctattgccaagacrccatgctcagtcctggggatttgggttatccaaaacagtcacacccttgatttcatggagattgtggctaatggcacaaacacatgaacaaatagggcac

SEQ ID NO: 19472 - DNA, 201 bp, Homo sapiens
tcacaactcattgcagcttctaactcctgagctcaagtaatcctcctgcttctgccgagtagctaggactatagggtgcctggctaatttttattttttttgtcaaaatggaggtttgctatgttgcccaggctggtcttgtactcctggactcaagtccttctgcttcagcctcccaaagtgcaaagtgctgggattaca

SEQ ID NO: 19473 - DNA, 201 bp, Homo sapiens
ttcagtctttctgcttttggccatagacaatacagttaaatacctgtttttctgtccttggctggctgattctaacactgtcatttctgggtggttttctrttttcttttcctcgttatgggttttccccctattctttgcatttctggtgtttcttaatgagggtgtttttgtattcctctgaatattattttgtgtttg

SEQ ID NO: 19474 - DNA, 201 bp, Homo sapiens
agcaggttaagtgctgcctctctcctgttgcttgttttctgtaatatgtcacctttcttggcatgattcctttgtccagtcttccagcgtcctgttgtatrgtgtgggtgggctggggactgcataaatgagttggagcagtgatgttcttggccttgctctgtcctgtgagagaggaccctgcaccatctggggctcctg

SEQ ID NO: 19475 - DNA, 201 bp, Homo sapiens; identical to SEQ ID NO: 5004

SEQ ID NO: 19476 - DNA, 201 bp, Homo sapiens
ggcttatgcctgtaatacatacacatgcactttgtaatcccagcattctgggaagctgaggcagggggatcactggagcctaggagtttgagaccagcctrggcaacaaagtgagacccccatctctacaaaatatagaaaaaagttagctggacctggtggtgtgcctttgtggtcccagctactcaggagactgaggtg

SEQ ID NO: 19477 - DNA, 201 bp, Homo sapiens
agggtcagacttgacatggtgtttggacgccatgtaaaatcgaaggaagtcgacttgggctttgcttattaaacagtgcctattatggtgaaattaaacgkctgaaggaatgtggatgagtcgtaatcttaaggaacatgacgatttgcccctcagttttgcgttttatgtcctcagattcatagctacctataccctaag

SEQ ID NO: 19478 - DNA, 201 bp, Homo sapiens
atggcgtgaacccgggaggcggaactttgcagtgagccgagatcacgccactgcactccagcctgggcgacagagcgagactccatctcaaaaaaaaaaamaaaaacaaataaacaactttgtattcattgcttcctatatactagtcatcacgctatttatttctagcagtggttatcaccagggtgatttttgttaccc

SEQ ID NO: 19479 - DNA, 201 bp, Homo sapiens
accataaaagagcttacttccctcttttcagaattgtttccctcctctgtaactggtgtccccagtccaaagattctacttccctttgcagacagaaaagygatacctttttgccaggataggagagggactgtgcaggttggctctgtgtggctgtgcagagttgtggggtgcatcttagggatcttcgtgccttttaaa

SEQ ID NO: 19480 - DNA, 201 bp, Homo sapiens
ctctttggtcctgtttatttgcaactcatgttcttcaacgctgggcatttttttgatttattgctttgatttcttcctatttgctttctctctctctctctagaattctactcttggactttctggattggcactcataattttcttaaggtttctttttcccccctctaaaatttttgtttttgtttttatcttttaaat

SEQ ID NO: 19481 - DNA, 201 bp, Homo sapiens
gcatccaggaagcatgtcacacacagccattcaagcccctttgttttcctgagaatacagggtgttttgagtaggaaactaataaactcatactgcactcygtctatgttttacacttcagtggttatttaaaactttgattttgatagaatttcacagaatagtataaagacacatcctgtggcaccagtttcttttctc

SEQ ID NO: 19482 - DNA, 201 bp, Homo sapiens
gatttcatcgcacaatcattgggcagaagggtgaacggatccgtgaaattcgtgacaaattcccagaggtaaagtttcccagagacattctgtaactctayaggagtgatccaagtcacacttcaggaatatttgatatttgggatatatgtccttcctcatacttgaacttagtctccccatgatttgttctaggtcatc

SEQ ID NO: 19483 - DNA, 201 bp, Homo sapiens
ggtctagtgtgagagacttatttgtagaagagtaattacattatggtgtgataagtgcaatgatagaaatatgtgtaaggtgtggacataggaaataggcwgtggttacctgttggaaagtcttcctacagaatgtggtccttgaactgcggtttaaaagacgagtaagagtttttccaggtggtgctgagtggacaggaa

SEQ ID NO: 19484 - DNA, 201 bp, Homo sapiens
gtgcctcgtgcccctgcctacctgcttgtgcagacctcactccctcatgggttgccgtgtccagtgtggacttcaaggcataatgtggtgggggtggaggkcttgactccaactctaaaaagccctgtctgtccccagtttgttttcaaaggcctgttctcatcagatcatcccttcctttccaggacaaacgtgctgtgg

SEQ ID NO: 19485 - DNA, 201 bp, Homo sapiens
acactcgaacttaccctaacctgggagtcagggcaaccttccccaagcatgtgatgtttaagctcatgctgttttaatggatgagttggtgctgctgggcrggaataagcaaagatggtgtttctgccagaatgtcttggaaaaatatgctccttcagaacctacaaatattcttgttttcttttattctcttcttgctat

SEQ ID NO: 19486 - DNA, 201 bp, Homo sapiens
ggctggagtgcagtggtgcagtcatggctcactacagccttggctttccagactcaagcagtcctcccaccttagccttccaagtagctgggaccacaggygcatgctaccgcaccaggctaatttttttcttcttttagttagtagagatgaggtcttgttatgttgtccaggctggtctcaaactcctcaagtgatcct

SEQ ID NO: 19487 - DNA, 201 bp, Homo sapiens
taaccagagaggattgtatgttcttaggtttcataagtatcttaagaaacatgtcatttagtaattatggtgaaataacttcatgatactttggcgggccrggtgcggtggctcatgaggtcaggagatcgagaccatcctggctaacatggtgaaaccccgactctactaaaaatacaaaaaattagccgggcttggtgg

SEQ ID NO: 19488 - DNA, 201 bp, Homo sapiens
tcgccatattggccaggctggtctcgaactcttgacctcaggtatctgcctgcctcagcctcccaaagtgctgggattacaggcacgagccaccgtgcccrgcctatttgaatcttttgaaatgatcaaattatctttgcccctcatgctgttaatgtggcgagtaactttactctgtttttctaatattgtaccccccca

SEQ ID NO: 19489 - DNA, 201 bp, Homo sapiens
tcttttcattaactgtgtaccccgaagactatgcatagtagtgtatggaggctttccttctaccttttatgctatgtgttgcttcactgcatggacacaamgtggtttcttcagcccatctgcatattgaagttgtgttactttccagattttttttttttagctttttatgtctcgctatctctgctgttgcccttctga

SEQ ID NO: 19490 - DNA, 201 bp, Homo sapiens
tccatggttcttagctctttcattcgttccatctctcgattttttttctaaaatgtcacctttatgtctcttatgcttttttattgtctcaatcttagttytgtctcccgaagttcttgagtctaatcctacttctaatccatccttccttctttttgagctttgggcttttagcctctctaccatttgtgctgatctgtg

SEQ ID NO: 19491 - DNA, 201 bp, Homo sapiens
ccttgtccctcctcagttcttctccataaagcaacgggagggaccctgcaccatcaagcagaatgcctcctgctgaaaagcctgtgttgacttttactacrgggtgggatgggtgatcctcttcactgtccccctctggtgtgtgcaccaggctccgcccccatccacctcctccgctttcctgcctgtacacccttagtt

SEQ ID NO: 19492 - DNA, 201 bp, Homo sapiens
ggtacacacgcggtgtcccagtgtggcctgtaggagcccctccagctgtcttctgtgtcctgttcacacgcctcttcacttctggggctctcgctttctgrcataaggagctggcacaggtttaccttggccttgccctttctgtctcccctagacctctcaccccccttcccactgcctctcctgggtggggctgcgtgc

SEQ ID NO: 19493 - DNA, 201 bp, Homo sapiens
aagccgtcctgatcccaagggacagggcagggaaggtgagtagtggtccgagagtcccttgtggcacctcatgggcatcggtcaaagccgtcatgaccccraggatgtgccaggagtcagggcctctcctcctacgtgggcctgaaggggctgctgtaattcaggagggtaggcttgggatgaagggtctggaatttctgt

SEQ ID NO: 19494 - DNA, 201 bp, Homo sapiens
aggctgccaaggaagctctggaggtatgtgtccatgtgcccccctccaccccccgccaaggcccagtcagcaggcacctggggagacgcgtggcctggatkggatggacggttgcccaagcggcagtggcagtggaggtagccctcttgctcctaccgtgtgcgcacgggctgtgcttctcggctggacacagagtttggg

SEQ ID NO: 19495 - DNA, 201 bp, Homo sapiens
gtgctgcagacaggagcaggggttctggaacttggagcagactgtgctggggtgctggtttgctaagggggttggctttccactcctcccgtgagcacgtygagtctggtgaatggggtggagctcgtgaacctcacatggtgtcagtgtacccctgcgtggactctgggttgtctcctgcagccaggtcatacctgtagc

SEQ ID NO: 19496 - DNA, 201 bp, Homo sapiens
aaattttttttcttttttttttttttgagacagagtcccgctctgtcgcccaggctggagtgcagtggtgcgatctcggctcactgcacgctccgcctccygggttcacgccattctcctgcctcagcctcccgagtagctgggactacaggtgcccgccaccacgcccggctaatttttgtatttttagtagagacgggg

SEQ ID NO: 19497 - DNA, 201 bp, Homo sapiens
actctttggtcctgtttatttgcaactcatgttcttcaacgctgggcatttttttgatttattgctttgatttcttcctatttgctttctctctctctctctagaattctactcttggactttctggattggcactcataattttcttaaggtttctttttcccccctctaaaatttttgtttttgtttttatcttttaaa

SEQ ID NO: 19498 - DNA, 201 bp, Homo sapiens
tgttttcatccatcgtcttgcctactctttggtcctgtttatttgcaactcatgttcttcaacgctgggcatttttttgatttattgctttgatttcttcytatttgctttctctctctctctctagaattctactcttggactttctggattggcactcataattttcttaaggtttctttttcccccctctaaaatttt

SEQ ID NO: 19499 - DNA, 201 bp, Homo sapiens
ctggcacagctgcatgtccatgttcccccctcagtgcatcgcctcgttgctgcctctgcgtgtgcatgtgtttgggatggacgcacaaaaagccctcctcrtggtccttccagcaagctgggcttccctttactgcacagtgggcaagattcctgccttgtttcctgatgatacggcttctccagagtttggggggcctgg

SEQ ID NO: 19500 - DNA, 201 bp, Homo sapiens
tttgatccgcatcgagggggacccacagggcgtgcagcaggccaagcgagagctgctggagcttgcatctcgcatggtaagtgccatggctgggccctctrgaaaggcactggccttgcgtctcttggccccctctaaggagtagcgtgttgtggtgtgcggccttagagaatggaagtcgacaaatcccacgttgcactg

SEQ ID NO: 19501 - DNA, 201 bp, Homo sapiens
ggagaggcgatggtgaaggactccagcactgtgagctgctgtcacatcactgccgtgagtgcagaattgcccagagcgtaggggtccgtgctgtctccatrtgtgttctgagccccttccttaaccagctctgatcctggcatgggacatgaactctctcttagccaaaaagtagacttgcatcgattgactgtaatttgc

SEQ ID NO: 19502 - DNA, 201 bp, Homo sapiens
ggcttgaataggttcatgtaaagtcatcaccacttcctcaaaaggaaattaacaaaaaaaaattttaattcagacgtcttgcagataacgtggcaattgtratgagaatagcacagcagagaaaataaattttgtgactctgtttttcactgatttgtagtacctggtgatacttaagtgtcctcttttccctctccaggt

SEQ ID NO: 19503 - DNA, 201 bp, Homo sapiens
agcttctgttttgtaatcaacactgtaggggaaagggccacttcactgaatatatggatcagaatgaagacattgacccctgacactctcctactcctcarttatcttcagacaaatcccagatacattattgtgccttagttcagatcttcccgttttcatgtatacatatatatagtcattgtgctcctaactcatgta

SEQ ID NO: 19504 - DNA, 201 bp, Homo sapiens
gctgtctccatgtgtgttctgagccccttccttaaccagctctgatcctggcatgggacatgaactctctcttagccaaaaagtagacttgcatcgattgmctgtaatttgcaacgtaagttagttgttggacaaatgatctatctcacttaccctcatgacaaacctctgaaggtttgtttgcaaataccagtgctctgt

SEQ ID NO: 19505 - DNA, 201 bp, Homo sapiens
agattgctgaagagtatggcggggtgatggtcagcttcccacgctctggcacacagagcgacaaagtcaccctcaagggcgccaaggactgtgtggaggcrgccaagaaacgcattcaggagatcattgaggacctggtaggcacttgggtgctcggggaggggttctcaccccccagtggccactcaccgaagccgtgta

SEQ ID NO: 19506 - DNA, 201 bp, Homo sapiens; identical to SEQ ID NO: 5018

SEQ ID NO: 19507 - DNA, 201 bp, Homo sapiens
ctttagcgctgtcctgcccagttatgtcattggcagaatgttgttggtctgtgtcctaaatgtgtttccttttgtgttcctaagtaaacagaatcaaagaycagtacaaggtgtccgtgcgcatccctcctgacagtgagaagagcaatttgatccgcatcgagggggacccacagggcgtgcagcaggccaagcgagagc

SEQ ID NO: 19508 - DNA, 201 bp, Homo sapiens
ttgggcatgggcggtcatctctcgatgacatcccacatgtccgggcacagacacccagggcatcctagctgggtgagtaataggttctgaaacaaccagargctggtcgaagtcctggaataatcgtgggtggaggaaacttcatcttgaagaaggcatctttcaggggagatgcaggggcagtctccaacaattcctgac

SEQ ID NO: 19509 - DNA, 201 bp, Homo sapiens
gccgacgatgcttaagcatcttttattccctttctagatggaggcatctttgaaaagtaaagcgcctcgtgtgatacagagcttcccctcctgcagataastctcacaaacacttagcatgtgtctgtccagagtttcctgttaaaacacactttcagaggcgtgtagtgtatgaataagtgccattttcatggcacatat

SEQ ID NO: 19510 - DNA, 201 bp, Homo sapiens; identical to SEQ ID NO: 5020

SEQ ID NO: 19511 - DNA, 201 bp, Homo sapiens
tccctctcctatattgatgtttatttccaaattagggtgtttagttttcctttctttttttttttttttttttttttttgagacggagccaggctggagtwcagtggtgccatcttggctcactgcaacctctgcctcctgggttcaagtagtgattctcctgcctcagcctcccgagtagctggtactacagatgcacgc

SEQ ID NO: 19512 - DNA, 201 bp, Homo sapiens
ttccctaacctggccttgtcagtcagcctcagtctaccatctacccaggtctgcataccccgcaaaacagtatacactttgacgcttttctgcaagcacarttaccttttgggggagcccttctcttaaagcagagtaggttaatgtttgtgaatgaaacggaactttggcaggctgaggtgtctcaggtcatcagcttac

SEQ ID NO: 19513 - DNA, 201 bp, Homo sapiens
ccagcaggacgcagctcttcctggcccttctgtcggcctctaaacacagtgcaggctgactttcttatcacagctcgtttggctggctggaccaaatgctrcttgtttctttctggagtggggaaataacttcaaccaggtgcagtcagtgtgtattcttatctcagctgcaaaagctgttctaaatgcccttctagggaa

SEQ ID NO: 19514 - DNA, 201 bp, Homo sapiens
actttgtatagcttcatataaggaccagtctgccttccttaactccttacctggaggataataaaccaggaactctggcagccttgtctatgtcaagcaarttactttaccaccttggtacagctatacgagttttaaaattccatccgtgctctgtctcattctttatgcaactcaagaggaccaggccttgtaaaagtt

SEQ ID NO: 19515 - DNA, 201 bp, Homo sapiens
ctccatggccagaaaggggaaagaagttgtagattttgtcataacttgaggtggagcgtttacagccatgcaggggtggacccgggccctgagaaggccaygaatttcctgtccctggtggtattaagaaatgggattagattaatatctgaggttcctttcaatcctgatttggacagtactgttagatccagtgagaat

SEQ ID NO: 19516 - DNA, 201 bp, Homo sapiens
ttacatcctcctgcctgctggaagaggccacttttccttttccctttggtgcagtggttggattagagctgcttggccagtgggtgaattgtcacttttgraaatccatctaagccctccccaaataacccacagaggccatgttgaaggcatgcccaagggcagcattctctatatttccgtcagacctgctaggttagc

SEQ ID NO: 19517 - DNA, 201 bp, Homo sapiens
cctggccagtatggcgaaaccccatctctactaaaaatacaaaaaaattagccaggcgtggcggtgggtgcttgcaatctcagctacttgggaggctgagrcaggagaatcacttgaacccgggaggcagaggttgcagtgagccaagatcatgccattgcactccagcctgtgcaacaggagcaaaactctgtctcaaaa

SEQ ID NO: 19518 - DNA, 201 bp, Homo sapiens
ggcagcattctctatatttccgtcagacctgctaggttagccaatcagtgttggtagtactcatgccttctgaacgtggaaactgctgatctggaactcaytgaagagtaaaaacattctagatttgtgcccaagtaaaacaacatggggagggatacttttttgagacagggtctcactctgtcacccaggctggagtgc

SEQ ID NO: 19519 - DNA, 201 bp, Homo sapiens
ctggtatttcctgtgttaatgataatggtttcatgtttaatgtctaggaccactgttaacacctccaccctgcactattctttttcagggttttcttgttyatttttgttggttctgtgttacaacctttataatcaactgtttgaaattgtattaatattttaaagttaattgggatgatcgccatctacttaaaccttc

SEQ ID NO: 19520 - DNA, 201 bp, Homo sapiens
ctcgactccctttatacccttaaaagaaacagtggcagttatcacttagtaaacacaatggatgcagaagtgacaagtccttcccggagggtggagacccygagagtagggattccgttccgcccagtcctgcgtatccaccgtgggctcagaggccacacaccggttcttttgcgtgtatacatctatgtagagatggag

SEQ ID NO: 19521 - DNA, 201 bp, Homo sapiens
gaacaaaaaagaaataccagagaatccaaccatcatatttaattcctgttttatttaaactttgtttccaattaatgttacagtcctttttaaaaattaawttttttttattttattccttttttttagtgacaaagcctcactctgtcacccaggctggggtgcagtagcgcagtcatagctcactgcagccttgaactc

SEQ ID NO: 19522 - DNA, 201 bp, Homo sapiens
tatgttgaccttcacgaggctgctaaataaagctcatgtatattagcgccagtcactgttttgtggattttttttttttttttttttttttttttttttttgagacggagtcttgctctgtcgcccaggctggagtgtagtggcgcaatctcgcctcactgcaagctccgcctcctgggttcacgccattctcctgcctca

SEQ ID NO: 19523 - DNA, 201 bp, Homo sapiens
ctgtgttaatgataatggtttcatgtttaatgtctaggaccactgttaacacctccaccctgcactattctttttcagggttttcttgttcatttttgttkgttctgtgttacaacctttataatcaactgtttgaaattgtattaatattttaaagttaattgggatgatcgccatctacttaaaccttctgttagctat

SEQ ID NO: 19524 - DNA, 201 bp, Homo sapiens
ttccttctgtctgaaggaaaccactcaacatctctcgtagtgtgtatccggtaatgacttctttcacattctgtatgtctgcaagtatttttttccttcaytttcgaaaagctgtttctgctgcataaaggtttctaggttggcagtttttttcctttccagacttggcttcattgccgtctcctgttgtttctgatgaga

SEQ ID NO: 19525 - DNA, 201 bp, Homo sapiens
tctttttcagggttttcttgttcatttttgttggttctgtgttacaacctttataatcaactgtttgaaattgtattaatattttaaagttaattgggatratcgccatctacttaaaccttctgttagctattttaaggagtgttttctaatttcgaatgcacatactccaccttgtgttgggcttatgtcttgctattt

SEQ ID NO: 19526 - DNA, 201 bp, Homo sapiens
cgctgctgcactccagcctgggccatagagccagaccttgtctcaaaaaaaaaaaaaagaaaaaagattatgatgtttgcatttaattacagttgtgattrtatatgttatatatcacatatttatatttattacatatgtttaacaaacgcggttaaataacttactgtaatttttttcctcaattgtggtaaaatatac

SEQ ID NO: 19527 - DNA, 201 bp, Homo sapiens
atcaactgtttgaaattgtattaatattttaaagttaattgggatgatcgccatctacttaaaccttctgttagctattttaaggagtgttttctaatttygaatgcacatactccaccttgtgttgggcttatgtcttgctattttcttgtccttttttcttttttccttttttctattagaaacacatcttttggccag

SEQ ID NO: 19528 - DNA, 201 bp, Homo sapiens
tggtttgttcttttttatttcaggataatattgcactgtagggatagatcatctgtttctttgtgtgtacttggtaattagtgtctttcaaggggttttctattttctccaaggtgtcaaatgtattaacatgaagttttttagaatagtcctgcattatccttttgctgtcaatactgacgtcacctctctttcacagta

SEQ ID NO: 19529 - DNA, 201 bp, Homo sapiens
tttccccagaaatgtttgagcctgccacgtgtgccatgtttgtgtttgtggtagaggagatgctttcatgattgagaagaagacgcattttatactctttycccctaatgtaaatttattcattaaacacaaaagatttgtaataaaatattttttccttaagattgttatataaagtttactaatgagaaaaactccctt

SEQ ID NO: 19530 - DNA, 201 bp, Homo sapiens
tggggtgtctgcttcctaggcgtgtccagcacagctttgcccacagtgggagactagcaagccttggtggccacagttgtgctggtttccagaaacagcaraccccctggcagcagagcccctccacgcccctcgctcccactgtggatgtgccgcccagggttttccgctgcttccccttccccttccccttcttcctcc

SEQ ID NO: 19531 - DNA, 201 bp, Homo sapiens
gctgtgtgcctcacctgtgccaggttgcaggtgtagcacagttacaggatgctgttagaagtgtgtcgtgggcattctgctgcaggtccaaggatgttttstgttgtttgtttgttttttgggacggagtctcgctctgtcaccaggctggagtgcagtggcgtgatctcagttcactgcaacgtccacctcccaggttca

SEQ ID NO: 19532 - DNA, 201 bp, Homo sapiens; identical to SEQ ID NO: 5001

SEQ ID NO: 19533 - DNA, 201 bp, Homo sapiens
tctttgtggagacagttatataagtaagcgtttctagggagtctttatatccaaaagtgaggcttaatctctgaagagtagactgataggaagagagtacytggagagatgatgcagtcccaccttctcatgagacaaaggaggaagcaggccaagtgaagagggtgatgtgccaagcagtgtcagcagcagatcgcacat

SEQ ID NO: 19534 - DNA, 201 bp, Homo sapiens
caccacagccaattaatttttgtatttttagaagagacggggtttcaccatgttggccaggcttgtctcaaattcctgggctcaggtgatctgcccaccttggcctcccaaggtgctgggattaaaagtgtgagccaccacacccagcagggggattctgttgaagaggcagtgatatgtcagccaaggtcgctatatgcc

SEQ ID NO: 19535 - DNA, 201 bp, Homo sapiens; identical to SEQ ID NO: 5002

SEQ ID NO: 19536 - DNA, 201 bp, Homo sapiens
tcgtggccctggggctcctgtggagacacccacaatgtccacaccacaacccagggatgaggccaggcagggaaaacgcaggtgcagagaagagctctgayttgaccaagatgacacagcaggaagtgacggcaccgacccctcaccacgtgctcgaattaggcaaagcacagggtcggggcctcatgccatggatgggag

SEQ ID NO: 19537 - DNA, 201 bp, Homo sapiens
caaatgatattactgatttaattatatttactttttaaacatttgctgataagtagacgattaggtggtcttatagcattggtttaaatcagtatgtgtgyggccgggtgcagtggctcatgcctgtaatcccagcactttgggaggcctaggtgggcagatcacgaggtcaggagatcgagaccatcctggctaacacga

SEQ ID NO: 19538 - DNA, 201 bp, Homo sapiens
ggcatcatctccatgattcaggcttctcgtgtatatgtgtgtgtgtaaaatttttgttttgccaacttgccaagcttgccttcactgttactagagcttcrttataatagagaggttttctaaacaggtcatctgcagacagtggtatttgtctccttgcttcattctgtctctttagatggcctattggacagtctttga

SEQ ID NO: 19539 - DNA, 201 bp, Homo sapiens; identical to SEQ ID NO: 5021

SEQ ID NO: 19540 - DNA, 201 bp, Homo sapiens
acaccacaccggtttattgtgtgccagctcgggttaagtgctgtctatgtatatgctcatggtaacacaaaaggcattaatatcaactttttataggagargagacaggcccaggaaatcaagatctgtaattatttcttctttttgttatcttggcccttaacttttagaagttcacacatttaaacattccatcttgac

SEQ ID NO: 19541 - DNA, 201 bp, Homo sapiens
tttgtcttgttttctgtctttctgtttctgatattgctttgttgacctttgtactgtggatgcccttgaaaactggtgtatttttctgaattaactggcckgtttgacatggtcaacttccgtgttagcttaaagaacagcagaataaatgtctgtagatgtctgtaccatccttctggcctttaaccagagaggattgta

SEQ ID NO: 19542 - DNA, 201 bp, Homo sapiens
cactcgaacttaccctaacctgggagtcagggcaaccttccccaagcatgtgatgtttaagctcatgctgttttaatggatgagttggtgctgctgggcargaataagcaaagatggtgtttctgccagaatgtcttggaaaaatatgctccttcagaacctacaaatattcttgttttcttttattctcttcttgctata

SEQ ID NO: 19543 - DNA, 201 bp, Homo sapiens
tgtcagtgttccacgaaaaaaaaaaaaacacgtctgatcctgccttctgctgcttgcagcccccacccagctcccaccatcctcaacagcacccgtggccyggctgcaggctgtgcggacctgaccccattccctgggtaaggctgggtgtgcccctacctcttcccctgtgtgggacggtcttgtccccagatacctgta

SEQ ID NO: 19544 - DNA, 201 bp, Homo sapiens; identical to SEQ ID NO: 4992

SEQ ID NO: 19545 - DNA, 201 bp, Homo sapiens
ttgcagagagagaccgctggctttttgtagcaactgtcatgatgcattttgtaagcattaagaggtgtgtggtgagcaaattgacagaataaccaaggtcrctgttaggagaacgatcctggtgttgatctatgcctggagcctgggtcaggcaggtggcaggttccatggtccccccacccctgcggttaggggtggtgt

SEQ ID NO: 19546 - DNA, 201 bp, Homo sapiens
tggcagatgcgggttttcaccatgttgcccactctggtctcaaacccctaggctcaaatgatccactcatttcagcctaccaaagtgttggaattacaggygtgagccaccacgcccagccaatcctccccttttttaatgccattgattagtggggaccgtaggtttttggttctgctattgactgattatttttggtga

SEQ ID NO: 19547 - DNA, 201 bp, Homo sapiens
gcatgccaccacagccaattaatttttgtatttttagaagagacggggtttcaccatgttggccaggcttgtctcaaattcctgggctcaggtgatctgcycaccttggcctcccaaggtgctgggattaaaagtgtgagccaccacacccagcagggggattctgttgaagaggcagtgatatgtcagccaaggtcgcta

SEQ ID NO: 19548 - DNA, 201 bp, Homo sapiens
tcatggcagccttgacctcctgggctcaagtgatcctcctgactcagcccttcaagtagttgagactgcaggcatgcaccatcaggcccggctttttttttgtttgttttttggcagatgcgggttttcaccatgttgcccactctggtctcaaacccctaggctcaaatgatccactcatttcagcctaccaaagtgttg

SEQ ID NO: 19549 - DNA, 201 bp, Homo sapiens
tgtccaaacaaggtcacaatgttgcatttgattatagagtcctgtctctcattctttaacagtgcttactccctcctacccccttttttttttttttttttgagacaggatctcactttgttgcccaggctggagtgcagtggtgcagacacagctcatggcagccttgacctcctgggctcaagtgatcctcctgactca

SEQ ID NO: 19550 - DNA, 201 bp, Homo sapiens
aggcgggtggacacttgaggtcaggagttcgagaccagcctgaccaacatggtgaaaccctgtctctactaaaaatacaaaaattagcctggcatggtggygcgcgcctgtaatcccagctgctcaagaggctgaggcatgagaatcgcttgaacccaggaggcggaggttgcagtgagccgagattgtagcactgcactc

SEQ ID NO: 19551 - DNA, 201 bp, Homo sapiens
ctcctgaagccgtgtcctctctctgcacaggctcctgacatgagcagctctgaggaatttcccagctttggggctcaggtggctcccaagaccctcccttkgggccccaaacgataatgatcaaaaagaacagaaccctctccagcctgctgacccaaacccaaccacacaatggtttgtctcaatctgacccagcggctg

SEQ ID NO: 19552 - DNA, 201 bp, Homo sapiens
tttttagtggaaaaactcactaaactaataatagaactgggacacttaccatttttgctctttgagtgaatgaacttgaaagtaataataattttttttttaagagacagagtctcaccttgttgtctaggctcttgtgcagtggctattcacaagtgtggttatagtacactgtggcctcaaactcctgggctcaggcaa

SEQ ID NO: 19553 - DNA, 201 bp, Homo sapiens
catcctctgctggaaaggcgagaccctttaatccagtctactggatgctcccccattgccatgaaccgccttctcagctccggacccatgtgtcgtaaggrcaagattattgtcacggtacgagtagtcttctccagttgagtggggtgttcctgttactgtcattgcttttcccattttagacacatgcctcactcctgt

SEQ ID NO: 19554 - DNA, 201 bp, Homo sapiens; identical to SEQ ID NO: 4999

SEQ ID NO: 19555 - DNA, 201 bp, Homo sapiens
gtcgcctgtggtctctcctagatttcgatcttgtgatctctgagtggatcaggattttattttcccattctgaactttggtttgtggtcttgagtaattttagttttggaagaggagaagtctgggtttcagccggaggcttttttggtgccctccatacccggtcctgtctggtgctttaaagcacttgcgggtctcatt

SEQ ID NO: 19556 - DNA, 201 bp, Homo sapiens; identical to SEQ ID NO: 5000

SEQ ID NO: 19557 - DNA, 201 bp, Homo sapiens
gagttatattagctgttcttggtccttgatcttttgtataaattttgttgtgtaaatatgattgtatttgtaactattctaaaaatggtgtatataaatawttttttttacaattcagtgtttgcaatgcaacattataaaaattacatatagaaaacttgtataaataaaaattgtataaaatctggttgtaaaattcca

SEQ ID NO: 19558 - DNA, 201 bp, Homo sapiens
ggcacagaggtttatttaatcaccagtcatttgatacagggtgaagacctatttgaaatgggactggctggattctacatgttttctttttttttttttttggaaacagggtcttgctgtgttgtccaggctggagtgcagtggtgccatcatggctcactgctcaacccctggggctcaggtgatcctcccacctcagct

SEQ ID NO: 19559 - DNA, 201 bp, Homo sapiens
ctgagtccggtatctccattgtctaactttgcatagaggaacatacctgtgctttggtggggacgttgtgcttgtattcgtgcagtttaatgttgaattarctctttgtggagacagttatataagtaagcgtttctagggagtctttatatccaaaagtgaggcttaatctctgaagagtagactgataggaagagagta

SEQ ID NO: 19560 - DNA, 201 bp, Homo sapiens
cagtgaattttcactaactgaactcactcatataaccagcattgagataaagaagtggaacgttttatttttagagtttagagtctgatttttttttttttcctttgagacagagttttgttcttgttgcccaggctggagtgcaatggcgcgatctcggctcaccacaacctccgcctcttgggttcaagcatttctcct

SEQ ID NO: 19561 - DNA, 201 bp, Homo sapiens
taaccttgaactcctgggctcaagggatcctcctgcctcagcctctcagtagctgggactacaggtgtgtgccatcatgcatggcttttcttattttattktattgtattttttatttttttgtggagatggggtcttgctttgttgtccaagctggtctcaaactcctgggcttaagtgatcctaaagtgctgagattac

SEQ ID NO: 19562 - DNA, 201 bp, Homo sapiens
cacctccacgggggaggccagtggggaagggctgtcacctcttccccatctgcatgagttctggaactctgtcctgttggctgcttgcttccagctccccscaatctccatcgcagcgggttcctcctgtcttttctacagtgtcataaaacatcctgcccctaccctctcccaaaggtcaattttaattctcaccaagtt

SEQ ID NO: 19563 - DNA, 201 bp, Homo sapiens
ccagtggggaagggctgtcacctcttccccatctgcatgagttctggaactctgtcctgttggctgcttgcttccagctccccccaatctccatcgcagcrggttcctcctgtcttttctacagtgtcataaaacatcctgcccctaccctctcccaaaggtcaattttaattctcaccaagttttgcacatctctgtatg

SEQ ID NO: 19564 - DNA, 201 bp, Homo sapiens
gaaaaggacgctgctcgcagggctcaggaggggccactcccctaaggaccaccagatgtccttccaggcgtcactgctgcagctggctggccttgggaacygtgaagggtgtccagtgggagctgagctggggagagggttgggggcagggacaagtcagactagggccaggagcaggccatggccacgaggcacagtggg

SEQ ID NO: 19565 - DNA, 201 bp, Homo sapiens
tgcccaggtttggggagagcgtgcctctgagccccaggtgagcagcctggctttcactgtgacacgaccttgagctctgcaaacccatggctgttctcccrttttcttaggccaatagcttcaccgtctcctctgtcgccgccccttcctggcttcaccgtttcatcattggcaagaaagggcagaacctggccaaaatca

SEQ ID NO: 19566 - DNA, 201 bp, Homo sapiens
ccaggtgcagtggctcacgcctataatcctagcactttgggaggctgaggcgggcagatcacctcaggtcaggagtttgagaccagcctggccagtatggygaaaccccatctctactaaaaatacaaaaaaattagccaggcgtggcggtgggtgcttgcaatctcagctacttgggaggctgaggcaggagaatcactt

SEQ ID NO: 19567 - DNA, 201 bp, Homo sapiens
ggaggcgcaaacattaaaaaggtgataacttgtccgctgcatcttgcttcttcttgccttgtcctctgtagccctgcaccattttggttttagactaggarggactcttccttacttctagccctgtgctcaactgtgtctcaactctgggagagctctagtcagcttctcatggtgatctctctccctgtagattcgtga

SEQ ID NO: 19568 - DNA, 201 bp, Homo sapiens
ggctgaggcgggcagatcacctcaggtcaggagtttgagaccagcctggccagtatggcgaaaccccatctctactaaaaatacaaaaaaattagccaggygtggcggtgggtgcttgcaatctcagctacttgggaggctgaggcaggagaatcacttgaacccgggaggcagaggttgcagtgagccaagatcatgcca

SEQ ID NO: 19569 - DNA, 201 bp, Homo sapiens
tgttaatttggtaagaatacattgactacatactctcccttactactttttattagcattcatattaatcttatttcaaatcaaggttacagcttcatgtmatttgtagagtcagataatcctagaaaggcttgtaagaaagaagtgccaacatccttcccctaatcatgtttcctcccctgcagagtatctacttcagcc

SEQ ID NO: 19570 - DNA, 201 bp, Homo sapiens
tggatgggggtaggttcgctgtcagagactgggagtctctggcctcctctagctctcacactcagggtgctgggcctggtgacctcctggggccttttccyatcactatgaattagaagagaggggtggggggagttgtccttggagcatttgatggttcttgtttgtctgtttttaagcactaaaacccttaaaagtgtt

SEQ ID NO: 19571 - DNA, 201 bp, Homo sapiens
cttgggagcaaatggccctagttagaaacactgataatgcctaggttatatcctgtgtttattagacataggtttgataatgcttatttaagcacccccccgcacttttttttttttgagacggagtttcgcccttgttgcccaggctggagtgtaatggtgtgatctcagctcaccgcaacctccgcttcccaggttcaa

SEQ ID NO: 19572 - DNA, 201 bp, Homo sapiens
ctctgtctcaggttcaagcaattctcctgcctcaacctcctgagtagctgggattacaggcgtgcaccaccatgcccagctaatttttgtatttttagtasagagggggggtttcaccatattgtccaggctggtctcaaactcctgacctcaagtaatgcgcccccccccccggcctcccaaagtgctgggattacaggt

SEQ ID NO: 19573 - DNA, 201 bp, Homo sapiens
cgatgtgcgtactccgtccctcgtgcttggattggctcccggggtagagccatcgcgtggcctgcctctcccattggttggcgtagggaggtgttctcctscggggcccctgattggccggctccgggaggcgccatcggtaatgcctgcggcaggggcggaactgctaggtggtctgagcccggctttgggctggggtcg

SEQ ID NO: 19574 - DNA, 201 bp, Homo sapiens
ggatcttttagatcacacccttaaccttttggatggaatggatgtcactaaggcaaaaatgtgtgagaatgtcactgtattaacctaagaacaaaccaaastagcagttaccagtatcatgcagcatatatttatgttgacaaagaatggtttaactttagcctttccacccaagtttagacctcttttctatgaatcttt

SEQ ID NO: 19575 - DNA, 201 bp, Homo sapiens
acctttagcacggatagtttcctggtcccaagtgggtgtggagccttccattatgggaataggaccaattccagccataaagcaagctgtgagtataaccytattcccttttatgaaatttgtcttcctgttagccttaagtgagcttattcatgtagttagctctagtctttccctaccagaagagtaaccaagagcatt

SEQ ID NO: 19576 - DNA, 201 bp, Homo sapiens
tgagccccctgccttaacctcccaagtagctgggggactacaggcatgagccaccacacccaactcaatatttatgtacaaaattattcttaaaacagttkaaggaaacatgtcatttctctgtatttgatcattgacttaacctatactgaaagaattaatttggtttcttgacatcccaactagacatacaaatgaaga

SEQ ID NO: 19577 - DNA, 201 bp, Homo sapiens
tttggggtcactcgctattttctaatacagaatgctcccgtcaagctcccttattgataactgatatctcttatgtcctgccagcagtgcacgattggctytgagactgcctgatccactcactcgtaaccagccaagtactatgacccaaactatagcagaatttggcacaaacaggtccctggtagctactttcctcag

SEQ ID NO: 19578 - DNA, 201 bp, Homo sapiens
aaatttctccagttacatgaaaaatggctctataaatgtgttggtagcacaaagcattaagagaatataaatgtttttgagctgttttctgtcaatattcyaatgtaaaaagacctttgataggatcagggataataaaagtattttatgtgacagccagcacaagacatacctccagaagctttggcaatgcgtttaagg

SEQ ID NO: 19579 - DNA, 201 bp, Homo sapiens
gtgcagtggcaccatcatagctcactgcagcctcaaaactcctaggctcaaatattcctcctgccttagcctcccattacctcgaactacaggtgcaccamgccttcttcatttcgtagagacaaggtctatgtcgcccaggctggttttgaactcctgagttcaattgatcctcttgccttaggctccccaagtgttgag

SEQ ID NO: 19580 - DNA, 201 bp, Homo sapiens; identical to SEQ ID NO: 5039

SEQ ID NO: 19581 - DNA, 201 bp, Homo sapiens
tgaaagggtagcatgctgatacattaagaggaaaaagacaagtttaagattttaaactgtgtccacagaagaataaacaatctaaatcttttctcccccgytaggtcaatattgaaggaggggctatagccttgggccaccctcttggagcatctggctgtcgaattcttgtgaccctgttacacacactggagagaatgg

SEQ ID NO: 19582 - DNA, 201 bp, Homo sapiens
ggcgtagggaggtgttctcctccggggcccctgattggccggctccgggaggcgccatcggtaatgcctgcggcaggggcggaactgctaggtggtctgagcccggctttgggctggggtcgggctgtcacacaatggctagaagtcgtgacttcgtctccttcgtgccgcatggttttcaacgcccttgacccgccggtt

SEQ ID NO: 19583 - DNA, 201 bp, Homo sapiens
aggtggtaaagaagccacagatatgtaactgaggttaataagcatggtagaaattaagtcactcatattttacaggaataaatgatggtgctgcagctgtygttcttatgaagaagtcagaagctgataaacgtgggcttacacctttagcacggatagtttcctggtcccaagtgggtgtggagccttccattatgggaa

SEQ ID NO: 19584 - DNA, 201 bp, Homo sapiens
ttgagatttcaggtgtgagccactacccccagccactgagagcatttggatcacatgctttctaggggaactgattctgttacattagccttaggtacacrtaacagatgctactggttcaaaattttaagacaatttagaatttctaagggatcttttagatcacacccttaaccttttggatggaatggatgtcactaa

SEQ ID NO: 19585 - DNA, 201 bp, Homo sapiens
ccaagacgtcaagtcggggaactccaacattggggtgtccagaaacactggggtttcaggcgctctgtaaatgcgtccgaggtccgcggttctgcccgcargcccagaccccggcctcacttccgccccgcgccccgcgccccggcctcacttccgccccgcgccccgcgccccgcgccccgcgcgcctccgcccgcccct

SEQ ID NO: 19586 - DNA, 201 bp, Homo sapiens; identical to SEQ ID NO: 5044

SEQ ID NO: 19587 - DNA, 201 bp, Homo sapiens
aataagcatggtagaaattaagtcactcatattttacaggaataaatgatggtgctgcagctgtcgttcttatgaagaagtcagaagctgataaacgtggrcttacacctttagcacggatagtttcctggtcccaagtgggtgtggagccttccattatgggaataggaccaattccagccataaagcaagctgtgagta

SEQ ID NO: 19588 - DNA, 201 bp, Homo sapiens
tttcctgtcagagatctcccctccccaactgctgtaatcctttttttttctttttgagacggagcctcactctgtcgcccaggctggagtgcagtggtgcratcttggctcactgcaatctccgcctcccaggttcaagcaattctcctgtctcagcctcctgagtggctgggactacaggcgcacaccaccacaccggct

SEQ ID NO: 19589 - DNA, 201 bp, Homo sapiens
caggccaagccgcgaggagccgcgggatccctggaaccctgcggctcccgcgttccctgacctggtgctacagccccaccctctcctctcccgatgtgcgyactccgtccctcgtgcttggattggctcccggggtagagccatcgcgtggcctgcctctcccattggttggcgtagggaggtgttctcctccggggcccc

SEQ ID NO: 19590 - DNA, 201 bp, Homo sapiens
tcctgggctcaagtgagccccctgccttaacctcccaagtagctgggggactacaggcatgagccaccacacccaactcaatatttatgtacaaaattatycttaaaacagtttaaggaaacatgtcatttctctgtatttgatcattgacttaacctatactgaaagaattaatttggtttcttgacatcccaactagac

SEQ ID NO: 19591 - DNA, 201 bp, Homo sapiens
aggtcatctttggacatgtcttggcagcaggtaagtctcagtgattccaggagaagtcaggcttattagaaacagcccataaacacacacacacacacacwctctcacacactcacacactctctcactcactcaagttcttgcctccttgcttttgctcagagttccctctgttatgattcctcctgttggcccccttct

SEQ ID NO: 19592 - DNA, 201 bp, Homo sapiens
caggacaaggttgcagttctgtcccagaacaggacagagaatgcacagaaagctggccattttgacaaagagattgtaccagttttggtgtcaactagaaraggtgagtatatcatagtggtttaaacatcaacctatttataggtaagagtaacatctaaaagagtaatacataggaatctttagaaattatatcttagt

SEQ ID NO: 19593 - DNA, 201 bp, Homo sapiens
catcgcgtggcctgcctctcccattggttggcgtagggaggtgttctcctccggggcccctgattggccggctccgggaggcgccatcggtaatgcctgcrgcaggggcggaactgctaggtggtctgagcccggctttgggctggggtcgggctgtcacacaatggctagaagtcgtgacttcgtctccttcgtgccgca

SEQ ID NO: 19594 - DNA, 201 bp, Homo sapiens
cagacaaaagcaaactagagagattgatagttgtacaatgcatgcttctttattggctcaaataaaggagctagaaggacattactgaaatataggtgaartttgaatgtggaccaaggattagataatagtgtttgattcatgttaaatttcctgatttttgttttgttttgtgagacagggtcacccaggctggagtgc

SEQ ID NO: 19595 - DNA, 201 bp, Homo sapiens
gccagggttgacagaatagttgctaataagagagttacaaaggatctgtgaatattgctctttcatgattttaatatccttggactcagtagcatttgtgrtaaaagtgctatattacaagtttagaatttagttaggcagcacacggtaactccttttatcctaagatggaactgtcattttagaaatgaacaaattcag

SEQ ID NO: 19596 - DNA, 201 bp, Homo sapiens
caaaactctgtctcaaaaaattaaattaaattaaattaaattaaaaaataggccaggtgtggtggctcatgcctgtaatcccagcactttgggaggtcaaygcaggcagatcacctgaggtcgggagtttgagacccacatgaccaacatggagaaactccatctctactaaaaatacaaaattagccaggctggtggcgc

SEQ ID NO: 19597 - DNA, 201 bp, Homo sapiens
tctcaggttcaagcaattctcctgcctcaacctcctgagtagctgggattacaggcgtgcaccaccatgcccagctaatttttgtatttttagtagagagrgggggtttcaccatattgtccaggctggtctcaaactcctgacctcaagtaatgcgcccccccccccggcctcccaaagtgctgggattacaggtgtgag

SEQ ID NO: 19598 - DNA, 201 bp, Homo sapiens
tcacatttctaaagggtggatcttttggggtcactcgctattttctaatacagaatgctcccgtcaagctcccttattgataactgatatctcttatgtcmtgccagcagtgcacgattggctttgagactgcctgatccactcactcgtaaccagccaagtactatgacccaaactatagcagaatttggcacaaacagg

SEQ ID NO: 19599 - DNA, 201 bp, Homo sapiens
gtttaaacatcaacctatttataggtaagagtaacatctaaaagagtaatacataggaatctttagaaattatatcttagttatgtttttcaggttgcaartatatgtcctggatacatgaatgtggggagggggtatgctgggtttacaggacacggtaacatgggacctatgtcagcactcaagcactcttggttccag

SEQ ID NO: 19600 - DNA, 201 bp, Homo sapiens
tacataggaatctttagaaattatatcttagttatgtttttcaggttgcaaatatatgtcctggatacatgaatgtggggagggggtatgctgggtttacrggacacggtaacatgggacctatgtcagcactcaagcactcttggttccagagcgtccatgaccactgtgcacacacagcaggtttcatgagaagctgga

SEQ ID NO: 19601 - DNA, 201 bp, Homo sapiens; identical to SEQ ID NO: 5043

SEQ ID NO: 19602 - DNA, 201 bp, Homo sapiens
tgtgatggtcttacagatgcatttcacaactgtcatatgggtattacaggtaaggcagacatggctgaaactgtattagctttaaaaaggttaaaaagacmatatactaatctgcttcttaggtgctttcgtccttatggccagagactgtcttaaggatttttatatctcttctttgattaactgaagtgaagtaagtat

SEQ ID NO: 19603 - DNA, 201 bp, Homo sapiens
attcatgttaaatttcctgatttttgttttgttttgtgagacagggtcacccaggctggagtgcagaggcacaatcatggctcactgcagccttgaactcytaggctcaagtgatccttctgcctcagcctcccaagcagctaggactactagctacatggcacacacaccatgcccggctaaatttatttttaatggaga

SEQ ID NO: 19604 - DNA, 201 bp, Homo sapiens
gaaagtaatgagttataacttattcaataaaatgaaaatgtatgagtccatcctgatataaataactgaataaatgggagaaaaggaaaaggttttctttrtggtaaaatgccaattaatatcttaccaatagaaggaatgttggagttagaaagtcatgaatgaatgctaaaactagtgggtgaaaatatgatggggaag

SEQ ID NO: 19605 - DNA, 201 bp, Homo sapiens
gcctaaattttgaacaatttcagcgtgcaaataagtaatgatagtaatgggttataactgcccaagtattgaaaaatttcagcatcaaagtaagtaatgaragtaatgagttataacttattcaataaaatgaaaatgtatgagtccatcctgatataaataactgaataaatgggagaaaaggaaaaggttttctttatg

SEQ ID NO: 19606 - DNA, 201 bp, Homo sapiens
aaaaaaatggcattttaataaaataagtctacataaagttcccttaagtcctgcctacacaggatatttagatatactatacagaaacaatgtctagtccmtgcagaagagatgaaaatggttacttcatctcaatttacagtggcccaatgttattttatcccatgcgtataactgctcgtatcactgtgagactacaag

SEQ ID NO: 19607 - DNA, 201 bp, Homo sapiens
tgggagtatggttccaacaatacaggtaagttccctgccctcttagggctcagttctgagcttggaaaataggtgccacatcatgccccttgcaaatgggrcatatcactccccagaggaatatagctgagtcctgagagtgcccccatcttctgattctttgggtttgaacactcgtaattaattaattaattattatta

SEQ ID NO: 19608 - DNA, 201 bp, Homo sapiens
ttacagcttgtactttactttaatgtgtaatactcaactcaaggtacaagacaattgcatttaacattgttataaataaaaggaacatcagatcaatcatwaagggctccagagtgaacagcatcttcataacttccatgtttatcatctttactttctggatgtaatttaataagatcatcaattcgaagaatggtgatt

SEQ ID NO: 19609 - DNA, 201 bp, Homo sapiens
tcattaagggctccagagtgaacagcatcttcataacttccatgtttatcatctttactttctggatgtaatttaataagatcatcaattcgaagaatggkgattgcagcttctgttgcaaatttcaaactcttaactttaactatggttggttcaaacacccctgcttgtttgttgtctcgaggtttaccattgctcaaa

SEQ ID NO: 19610 - DNA, 201 bp, Homo sapiens
tttacagcttgtactttactttaatgtgtaatactcaactcaaggtacaagacaattgcatttaacattgttataaataaaaggaacatcagatcaatcawtaagggctccagagtgaacagcatcttcataacttccatgtttatcatctttactttctggatgtaatttaataagatcatcaattcgaagaatggtgat

SEQ ID NO: 19611 - DNA, 201 bp, Homo sapiens; identical to SEQ ID NO: 5048

SEQ ID NO: 19612 - DNA, 201 bp, Homo sapiens
ttttcagtctcaagtaaccttacccgtttttagtttccagcctaatcccagattgataacattgtgatgaatataatctctaagtttttatcagcgacttmtttgctagttcttccccacaaactctccaaggaagggtggtaggtttgagtatatctgaaactgggaatagagtaaccactttataaacatttaccattg

SEQ ID NO: 19613 - DNA, 201 bp, Homo sapiens
ggatttaaaaataaaagcaaaaaatgtaaagcttctagaagtatatataagagaatagcttttacagggtgcagtggcaggtgcctatagtcccagctacyagggaggctgtggtgggaggatcacttgaggccagcagtttgaggttgtatagtatactatggttgattttgcctgttagtagctgctgcactccagcct

SEQ ID NO: 19614 - DNA, 201 bp, Homo sapiens
tacagccccaccctctcctctcccgatgtgcgtactccgtccctcgtgcttggattggctcccggggtagagccatcgcgtggcctgcctctcccattggktggcgtagggaggtgttctcctccggggcccctgattggccggctccgggaggcgccatcggtaatgcctgcggcaggggcggaactgctaggtggtctg

SEQ ID NO: 19615 - DNA, 201 bp, Homo sapiens
aagtaaccctgagagcttaccagtgaatttcacaatccaattttaagatagtatcttctaggtgttggccatgtgggtaatagttaaagaaatactagttactaggactgagttcattacttcccaaggtaaaaaaaaaaaaaaaaaaaaaaagacattggcttacttggcataaaaggaacgaggtaagataggcaggga

SEQ ID NO: 19616 - DNA, 201 bp, Homo sapiens
gcaccgcactgggcctgtctttttaatatgtatatgatcctgcatatgttttcagtctcaagtaaccttacccgtttttagtttccagcctaatcccagaytgataacattgtgatgaatataatctctaagtttttatcagcgacttatttgctagttcttccccacaaactctccaaggaagggtggtaggtttgagta

SEQ ID NO: 19617 - DNA, 201 bp, Homo sapiens
caggagcgccgagggccggacttgtgtaggagaggggcgtatgtggaggaagccggtcaggccaagccgcgaggagccgcgggatccctggaaccctgcgsctcccgcgttccctgacctggtgctacagccccaccctctcctctcccgatgtgcgtactccgtccctcgtgcttggattggctcccggggtagagccat

SEQ ID NO: 19618 - DNA, 201 bp, Homo sapiens; identical to SEQ ID NO: 5049

SEQ ID NO: 19619 - DNA, 201 bp, Homo sapiens
agtggctcccagtaagaccatggccaaatacatcctgaagtagaatatctggaaaatttgagatttggcaaaagccaacaccacaatccctccaaattttstaagtgtgattccactgaacacctaaaagaagagatactgtgttagaaaccacttttaccaacctgtaattgaacaaaaacacttccttacaaggatttc

SEQ ID NO: 19620 - DNA, 201 bp, Homo sapiens
acctggccaagttgtagctgatggtctgtccgaaaatgctggttcactctccactggccaactgtctgtctgcactgcactgccagttgcctcttgcctgsgccattgcgctaacatctccacttactgttccacctgcttcctgtttctttgccgtttccagaccttccactttgccacgcaagctatctttgtaaaaca

SEQ ID NO: 19621 - DNA, 201 bp, Homo sapiens
tttctggtgaccatggtcctcctgggctgtgagctctggtctgcagtcatcatgtgtgccaccatcgccatggtcttggtcaacatgtttggagttatgtrgctctggggcatcagtctgaacgctgtatccttggtcaacctggtgatggtgagtcctcatacagtctcagtttgtccctagctcctgtttcacttgggg

SEQ ID NO: 19622 - DNA, 201 bp, Homo sapiens
agtgcagctgcctctcaccctttacctcgtgcctgggtcgctaacacagtgtcatgtatcacaccccccacaagatttaaagatagaagagcctttggtgycttttgttctgtctcagatatatagcccagtcccctgtagtgccccagctatttgggaggcagcctccctctgaggagttgaggcagtataggtctgcag

SEQ ID NO: 19623 - DNA, 201 bp, Homo sapiens
atatttctggtgaccatggtcctcctgggctgtgagctctggtctgcagtcatcatgtgtgccaccatcgccatggtcttggtcaacatgtttggagttaygtggctctggggcatcagtctgaacgctgtatccttggtcaacctggtgatggtgagtcctcatacagtctcagtttgtccctagctcctgtttcacttg

SEQ ID NO: 19624 - DNA, 201 bp, Homo sapiens
ttctgcagttaacatcctccttggccatggcaccagggtcggagccacgtacttcatgacctaccacaccgtgctgcagacctctgctgactttattgacrctctgaagaaagcccgacttatagccagtaatgtcaccgaaaccatgggcattaacggcagtgcctaccgagtatttccttacaggtaaagcctgccctt

SEQ ID NO: 19625 - DNA, 201 bp, Homo sapiens
ccagccatcccattactgggtatatacccaaaggattataaatcatgctgctataaagacacatgcacacgtatgtttatagcggcactattcacaatagyaaagacttggaaccaacctaaatgtccaacaacgatagactggattaagaaaatgtggcacatacacaccatggaatactctgcagccataaaaaatgat

SEQ ID NO: 19626 - DNA, 201 bp, Homo sapiens
caaaatggtagaatttatgtgtatccttaacccagtttccccgatgatacaacttacataactcatagtacatctagaactagaaataccatttgacccakccatcccattactgggtatatacccaaaggattataaatcatgctgctataaagacacatgcacacgtatgtttatagcggcactattcacaatagcaaa

SEQ ID NO: 19627 - DNA, 201 bp, Homo sapiens
tcaggtaactagttcatagtttctcccagtaagagaggtaactggtacatttatcctgctgtggctaatttagggggtgctgggagtgggaatggaggagsaaatgaattgccttcaggcattgctgtcataattgaaagaataagcagttaaaaagggggtgggaggcagcttttctagagctctgctatagtattagct

SEQ ID NO: 19628 - DNA, 201 bp, Homo sapiens
attactgataatagccaaactgtggaaacaactcagatatttatcacctgatatatggataaacaaaacatatgtccttgcaatgaaatgttgttcggccrtaaaaagaaatgaagtattgatacatgccacaatatgcatgaaccttgagaacattatgctaaatgaaagaagccggtcatgaaagaccacatattatat

SEQ ID NO: 19629 - DNA, 201 bp, Homo sapiens
tgcagtgagctgagatcacaccattggactccagcctgagggacagagactccatctccaaaaaaaaaaaaaaaaaaaaaactcttactactcaatgatarataaataacccaatttaaaatggcaaaagatctgaatagagtagacatttctctaaggaagatatacaaatgaccaacaagcacatgagagatgctcaat

SEQ ID NO: 19630 - DNA, 201 bp, Homo sapiens
aagaacacccactgtaacactattgtgattgtgaaaaattgaagacctcaagaacgagaagacaagacacagactgggagaaagtatttgcaaaagacatrttagtaaggactgttattcaaaatatacaaataactcctaaaactcaataagaaagcaaacagcccaattgaaaaatggacaaaacaacctgaacagata

SEQ ID NO: 19631 - DNA, 201 bp, Homo sapiens
tgggctgtgagctctggtctgcagtcatcatgtgtgccaccatcgccatggtcttggtcaacatgtttggagttatgtggctctggggcatcagtctgaaygctgtatccttggtcaacctggtgatggtgagtcctcatacagtctcagtttgtccctagctcctgtttcacttgggggaattggctgtcttagattcca

SEQ ID NO: 19632 - DNA, 201 bp, Homo sapiens; identical to SEQ ID NO: 5074

SEQ ID NO: 19633 - DNA, 201 bp, Homo sapiens
tcggtgagtcttgtagacagccagcaaggttttctgcaagggatgtttcccaaaggagtctgaccacttggcagtggtgacaggatgaacacgcagtgttygggagtgagagcgagctttaatgaggcctcccctctcccctccagtgtgttttatgtcttctacgaacagtacctgaccatcattgacgacactatcttc

SEQ ID NO: 19634 - DNA, 201 bp, Homo sapiens
ttgaagatgaactaaatcgtgaaagtgacagtgatgtcttcaccgttgtaattagctatgccatcatgtttctatatatttccctagccttggggcacatsaaaagctgtcgcaggcttctggtaagccggggggggggtggtgtatgttctagaggttaacagcagtgcacagtgtaacgtcatatttttgcctctttat

SEQ ID NO: 19635 - DNA, 201 bp, Homo sapiens
gacctggactctcttgacacccaggattctttcctcaggggacatgctgcctatagttctgcagttaacatcctccttggccatggcaccagggtcggagycacgtacttcatgacctaccacaccgtgctgcagacctctgctgactttattgacgctctgaagaaagcccgacttatagccagtaatgtcaccgaaacc

SEQ ID NO: 19636 - DNA, 201 bp, Homo sapiens
  misc_feature (1)...(201): n = A,T,C or G, or insertion/deletion polymorphism (see Tables 1-2)
ctattcttctaacagtcctccctgcatgtctccgccagtggttgaccctgcctgcgttcgctgcaggcctctgactccggaaggcaaacagaggcctcagnggggagacttcatgagattcctgcccatgttcctttcggataaccctaaccccaagtgtggcaaagggtaagtgctgctgccattgcagataagcatcca

SEQ ID NO: 19637 - DNA, 201 bp, Homo sapiens
tacaaaaaatctggagacctattcttctaacagtcctccctgcatgtctccgccagtggttgaccctgcctgcgttcgctgcaggcctctgactccggaargcaaacagaggcctcaggggggagacttcatgagattcctgcccatgttcctttcggataaccctaaccccaagtgtggcaaagggtaagtgctgctgcc

SEQ ID NO: 19638 - DNA, 201 bp, Homo sapiens
tgtgaagggcatcagctctccagtcaaattgaactgcttgctagcaaaatcctgcccatcttccagggccccatttcacatgctacattatctacgacatycttgtcctgttcccctaactagaatgccttccctctgaagttctgaatctttatttaaactgctgcaacagcatttgctgcctcattaaaagaccttggt

SEQ ID NO: 19639 - DNA, 201 bp, Homo sapiens
ttcgtttcctcagtggggttgcagcagtgggtgaggtggtgtgccagtgccgaggacacggctgcgaccaaggcagacatggtccttgcctttgtggcccyaccatctagtcagggtggcacagcagaaccaagtaattaatcatagctggggaggcgcgaaagcagcaggacaagagtgggaatagcagggcagggttga

SEQ ID NO: 19640 - DNA, 201 bp, Homo sapiens
gacttcctccctgtggagcaggtcagtaaccctgtctgtcctctctagtacccgaataggcttcgccccctcgtcctggatcgacgattatttcgactggrtgaagccacagtcgtcttgctgtcgagtggacaatatcactgaccagttctgcaatgcttcaggtaccttctcctttaccaaatctttcctgttttgctg

SEQ ID NO: 19641 - DNA, 201 bp, Homo sapiens
aaaaatcggctagacatcttttgctgtgtcagaggtgctgaagatggaacaagcgtccaggcctcagagagctgtttgtttcgcttcttcaaaaactcctrttctccacttctgctaaaggactggatgagaccaattgtggtatgcgcttatctgtggtttttctctttcctctcactgaaacagattatcacatgcctt

SEQ ID NO: 19642 - DNA, 201 bp, Homo sapiens
agagcccttctctccccgacaggagcattgtccgtgatgccagccgtgcacaccttctctctctttgcgggattggcagtcttcattgactttcttctgcmgattacctgtttcgtgagtctcttggggttagacattaaacgtcaagaggtaagttggtgccaggattatagtctatttaatttgagtctagaatctaga

SEQ ID NO: 19643 - DNA, 201 bp, Homo sapiens
gatgtccatcctgtttttataacctactgaacctgttttgtgagctgacatgtagccctcgacagagtcagtttttgaatgttacagctactgaagattaygttgatcctgttacaaaccagacgaaaacaaatgtgaaagagttacaatactacgtcggacagagttttgccaatggtaagtaaacttttaattattcct

SEQ ID NO: 19644 - DNA, 201 bp, Homo sapiens
agaaatggcgttgttattgagaaattttaatgtcgcataatttttttttttttttttaagagagatgaacgtcttcaaggggaaaccctggatcagcagcygggcagggtcctaggagaagtggctcccagtatgttcctgtcatccttttctgagactgtagcatttttcttaggtaattatgctttcaatcctaccagt

SEQ ID NO: 19645 - DNA, 201 bp, Homo sapiens
atcatgcagtccttcctctccccccatgctttgctttgcacatcattcttgtccctccctctggtgaagggttgtgatagagtcaggtcctcagtagagcyggcctcggggagctgttaaaaattttgttctgctgtagctggctggttttgtcaaacttagttttttatctgttctgttggctatgaccctgagcagtga

SEQ ID NO: 19646 - DNA, 201 bp, Homo sapiens
tgtaactaattggtgattgtgtctgtcgcctctctcaggtggattcgaaggtctcactaggcatcgcgggcatcttgatcgtgctgagctcggtggcttgstccttgggtgtcttcagctacattgggttgcccttgaccctcattgtgattgaagtcatcccgttcctggtgctggctgttggagtggacaacatcttca

SEQ ID NO: 19647 - DNA, 201 bp, Homo sapiens
taagtaagtagtaaaaaaaagaaaaaaagtccgtctatacactgtaaagtgctgtgtaaatgttcataattactatcactgtcttcttcatagttgatggrgggaaggctggatacataaaaaaatggtaatacagtaagaagtgctcagataagaataaagataaaatgttatggagagtccatttttgagctgagctat

SEQ ID NO: 19648 - DNA, 201 bp, Homo sapiens
agacagactcttgctctgtcaccgaggctggagtacagtggcatgatctcagcttactgcaacctcctcccgggttcaagcgattctcctgcctcagcctscccagtagctgggactgcaggcacatgccaccacacctagctaagttttatatttttagtagaggtggggtttcaccatgttggccaggctggtctcaaa

SEQ ID NO: 19649 - DNA, 201 bp, Homo sapiens
aatctgaccatttccttcactgctgaacgaagtattgaagatgaactaaatcgtgaaagtgacagtgatgtcttcaccgttgtaattagctatgccatcakgtttctatatatttccctagccttggggcacatcaaaagctgtcgcaggcttctggtaagccggggggggggtggtgtatgttctagaggttaacagcag

SEQ ID NO: 19650 - DNA, 201 bp, Homo sapiens
tagtttaactaaaaatataacattttgcttaccttttaggtttattaattttgtgaaaaactacaagaatcccaatctgaccatttccttcactgctgaaygaagtattgaagatgaactaaatcgtgaaagtgacagtgatgtcttcaccgttgtaattagctatgccatcatgtttctatatatttccctagccttggg

SEQ ID NO: 19651 - DNA, 201 bp, Homo sapiens
cctttcagtaatgtccttctattgtgccacccttttaagatgagaactcttacctatgtaactgagtaagacagggagaaatattaatccgtgagtggctrccagtaagaccatggccaaatacatcctgaagtagaatatctggaaaatttgagatttggcaaaagccaacaccacaatccctccaaattttgtaagtgt

SEQ ID NO: 19652 - DNA, 201 bp, Homo sapiens
atccgcccacctcggcctcccaaagtgctgggattacaggcatgagccactgcacctggcctagaaggggcttttttttaacctttcctgaactgttcctrtcgttgaaagaagcttccctatccagtcattttcttagtaattaaactctagagcatgttgtgaaatatccatatgatctaacctttaaaaatagaaact

SEQ ID NO: 19653 - DNA, 201 bp, Homo sapiens
aggttttaaaattttcttttgagattgcctcggtgtttttccttaaagttagcacattctttgctttctacttcagcctcaaggacaggaagttcattctygctctttacattggggtgttgatgtttgtggttttgttgttttgttcttcatgttactcatgatgtattgatattaattaacctaaatacatatggaaat

SEQ ID NO: 19654 - DNA, 201 bp, Homo sapiens
catctgcaccagagacactgccgggtccgagtgagggcaggaggctgcacgagggagcctccctgggagtgagcgataggttcgctatgggaggtgggttygaaaggtgcctgagattttcatttgaaactctgttgaagaggaattggcaatagaggaggaaatacaaatagaggaaagattggtttcgtcttaagcact

SEQ ID NO: 19655 - DNA, 201 bp, Homo sapiens
taatagatcaggaatgggtttagcctgctggcctgacccctgattcagtcaccacactgtgaacattccatagggaaaaaactgcagacagtgtatactgrcacccactttcatagttttgttttagttttgtggctcctaaatgtctaagactaactagtaatatgaccttgggtgagtcacataaaaaaccagaagcta

SEQ ID NO: 19656 - DNA, 201 bp, Homo sapiens
agcaattatgtgccgtagagaaaatgtggctattctgtttccctagagttttttaaaatttatttttaaaatttatttattttagagacaggttcttgctstgttgcccaggcgtgggggcagtgtcgccatcatagctcactgcagcctggaactcctggcctcaagcagtccttccaccttggcctcccaaagcactgg

SEQ ID NO: 19657 - DNA, 201 bp, Homo sapiens
caactttttggtttatcttaaagtttatttcacataatccagttttttcttatttgtccagtccatcacctaagaatgcaaactcataacatgtgttgccsgagcagacctagaaatgtttacaagtcctctctgaaacacagaattgtacattcaactctaggtttaatacagccctgtaaagtaaaaaggaggaccttt

SEQ ID NO: 19658 - DNA, 201 bp, Homo sapiens
aagaagccagacagcctgggaaggagattcttaaagctgttaaaatgtatctaaaaaaaaagcaaaagcaaatgtggaacagtagataaaatgtttttccygtgagcttttatcagtccatataaacaagagttttaagttttttattttgaaatagtttcagattcacagaaagttgcaaagaaacttttatttttcctc

SEQ ID NO: 19659 - DNA, 201 bp, Homo sapiens
atgttctagaggttaacagcagtgcacagtgtaacgtcatatttttgcctctttattcttattccattatgtttaaaactgccataaattcccccatgttktaattgtatgtaacgtttctgttgcctacatctattttcttcattccaactttttggtttatcttaaagtttatttcacataatccagttttttcttatt

SEQ ID NO: 19660 - DNA, 201 bp, Homo sapiens
ctgttaaaatgtatctaaaaaaaaagcaaaagcaaatgtggaacagtagataaaatgtttttcccgtgagcttttatcagtccatataaacaagagttttmagttttttattttgaaatagtttcagattcacagaaagttgcaaagaaacttttatttttcctcttaataatgaggaaatagaagccaagagaggtgaag

SEQ ID NO: 19661 - DNA, 201 bp, Homo sapiens
cttattccattatgtttaaaactgccataaattcccccatgttttaattgtatgtaacgtttctgttgcctacatctattttcttcattccaactttttgktttatcttaaagtttatttcacataatccagttttttcttatttgtccagtccatcacctaagaatgcaaactcataacatgtgttgcccgagcagacct

SEQ ID NO: 19662 - DNA, 201 bp, Homo sapiens
cacacttaaggaaacaccatctggggacacagggagaaggtgctgtctacaagccaggaagagagccctcaccaggaaccaaataagctccccatgctgawcttgaactctctaacctctagaactgtaacagataaattcctattgtttaagtcacaccagtctttggtattttgtgcaatggcctcagacgtcactaaa

SEQ ID NO: 19663 - DNA, 201 bp, Homo sapiens
tgcatagagtatctgagaaaatgaggcatgcagtcgatgtttggtatttttgtttcatttatttattttactgccatgcctcgagaacaatagatgttcaktaagtatttgaatatgttagttaatgctttaggatttcctaaaggcagtggaatagaattctcactgagttcagagcttttctgataataatgtgtgctt

SEQ ID NO: 19664 - DNA, 201 bp, Homo sapiens
ttcattaaactgtgaaagtgacatgtggctgaagcttttagataaggggaaagattatccctcactagtaaggaaagtaatcgatagagaagaaagtaatrcccctcactgtcagtattttaaaatgttttacaaaaaatctggagacctattcttctaacagtcctccctgcatgtctccgccagtggttgaccctgcct

SEQ ID NO: 19665 - DNA, 201 bp, Homo sapiens
acaaaataaataaaatcacagattgcatttaggtacttccatacattgctggctgcaatttctttggagggcaatttgacaacaatcaaaacttaaatacscatttcctttgatccaacaatataaaagtatttccaacagttctatttgcgcatgattgcaaagatttacatccaagaatgggccaggagtggtggctca

SEQ ID NO: 19666 - DNA, 201 bp, Homo sapiens
tctgtcctctctagtacccgaataggcttcgccccctcgtcctggatcgacgattatttcgactgggtgaagccacagtcgtcttgctgtcgagtggacartatcactgaccagttctgcaatgcttcaggtaccttctcctttaccaaatctttcctgttttgctgaaaaattttcaaattatcatttaaaaatcatttg

SEQ ID NO: 19667 - DNA, 201 bp, Homo sapiens
tctgggtggtcagtggccatgagaggtcaagtgagttgctttcggtgagtcttgtagacagccagcaaggttttctgcaagggatgtttcccaaaggagtytgaccacttggcagtggtgacaggatgaacacgcagtgttcgggagtgagagcgagctttaatgaggcctcccctctcccctccagtgtgttttatgtct

SEQ ID NO: 19668 - DNA, 201 bp, Homo sapiens
agcgggtataacctttgtttccctctgtcccctcagaaaaatcggctagacatcttttgctgtgtcagaggtgctgaagatggaacaagcgtccaggcctsagagagctgtttgtttcgcttcttcaaaaactcctattctccacttctgctaaaggactggatgagaccaattgtggtatgcgcttatctgtggtttttc

SEQ ID NO: 19669 - DNA, 201 bp, Homo sapiens
ctgtcccctttcctctccctccagcttttcctggactttttcacctgagggtcctgcagtaatggcaggtggcctgcccagaaccatgcccttacctgctkcttctccccattttgtttaaaggcagtgacagctaccagttactcaggcttgaggctttatccctgaattctgcctcgccctcgccttcctcatggggtt

SEQ ID NO: 19670 - DNA, 201 bp, Homo sapiens
tcagttagtttaactaaaaatataacattttgcttaccttttaggtttattaattttgtgaaaaactacaagaatcccaatctgaccatttccttcactgytgaacgaagtattgaagatgaactaaatcgtgaaagtgacagtgatgtcttcaccgttgtaattagctatgccatcatgtttctatatatttccctagcc

SEQ ID NO: 19671 - DNA, 201 bp, Homo sapiens
tcatttgtggagaacaaacatacagttaaaaaaacaaaactgggccgagagttattcatgcctgtaatcccagcaatttgggaggcagaggcgagcacatyacttgagctaggagtttgagaccagcctgagcaacatggagaaaccccgtctctgcaaaaaatacaaaaattagctgggcatggtggtgcatgcttgtag

SEQ ID NO: 19672 - DNA, 201 bp, Homo sapiens; identical to SEQ ID NO: 5099

SEQ ID NO: 19673 - DNA, 201 bp, Homo sapiens; identical to SEQ ID NO: 5100

SEQ ID NO: 19674 - DNA, 201 bp, Homo sapiens
ttcaccatgttggccaggttggtctcgatctcttgacctcgtgatcccgcccaccttggcctcccaaagtgctgggtttacaggcgtgagccaccgcgccyagcccagtagtgtgtttttaaaggacctaaaagttttaaataaaatgagggccacaaggtgaaattatcctttattaattgttctcttaacatcttctta

SEQ ID NO: 19675 - DNA, 201 bp, Homo sapiens
ttccttttattggagaatggtatgtagaaacgaagatctgggcactaggtatgctcattgctgctggaaagagtagcatgtttttgtttgtttgtttgtttttttgagatggagtcttgctctgtcaccaggctggaatgcagtggcgcgatctcagctcactgcaaccaccgcctccctggttcaagcagttctcctgcc

SEQ ID NO: 19676 - DNA, 201 bp, Homo sapiens
atgttgatagttgaaaatggcatccttgagtagccactgaatccttctccacatgacactctaagcagcagctcccaaatccacaggcactcgcttacaaratgtttgccgttgttttcaaaggcagtctttctcttctgtgcacacaactcattggggaagcagccttgttaatgaccagaagctcttgactcaccacat

SEQ ID NO: 19677 - DNA, 201 bp, Homo sapiens
ccatgctgatcttgaactctctaacctctagaactgtaacagataaattcctattgtttaagtcacaccagtctttggtattttgtgcaatggcctcagaygtcactaaatgacattgattacattctattaccccaaaaccctagttctatcttcattttctgttattgaactttaggcttcaggttaggaactaggcaa

SEQ ID NO: 19678 - DNA, 201 bp, Homo sapiens
gttccttttattggagaatggtatgtagaaacgaagatctgggcactaggtatgctcattgctgctggaaagagtagcatgtttttgtttgtttgtttgtttttttgagatggagtcttgctctgtcaccaggctggaatgcagtggcgcgatctcagctcactgcaaccaccgcctccctggttcaagcagttctcctgc

SEQ ID NO: 19679 - DNA, 201 bp, Homo sapiens
ggttccttttattggagaatggtatgtagaaacgaagatctgggcactaggtatgctcattgctgctggaaagagtagcatgtttttgtttgtttgtttgtttttttgagatggagtcttgctctgtcaccaggctggaatgcagtggcgcgatctcagctcactgcaaccaccgcctccctggttcaagcagttctcctg

SEQ ID NO: 19680 - DNA, 201 bp, Homo sapiens
tggttccttttattggagaatggtatgtagaaacgaagatctgggcactaggtatgctcattgctgctggaaagagtagcatgtttttgtttgtttgtttgtttttttgagatggagtcttgctctgtcaccaggctggaatgcagtggcgcgatctcagctcactgcaaccaccgcctccctggttcaagcagttctcct

SEQ ID NO: 19681 - DNA, 201 bp, Homo sapiens
agtcctccctgcatgtctccgccagtggttgaccctgcctgcgttcgctgcaggcctctgactccggaaggcaaacagaggcctcaggggggagacttcakgagattcctgcccatgttcctttcggataaccctaaccccaagtgtggcaaagggtaagtgctgctgccattgcagataagcatccactgcaactttaat

SEQ ID NO: 19682 - DNA, 201 bp, Homo sapiens
atattagtatgcatggcagtcagcattttcttaataaataaagatctcatctcagcctggccaaaatgtgaaaccctgtctctactgaaaatacaaaaaawattagccacacgtggtggtgtgtgcctgtagtcccagctactcgggagactgaggcaggagaatcacttgaatcctggaggtggagtttgcagtgagcca

SEQ ID NO: 19683 - DNA, 201 bp, Homo sapiens
tttactaagcagtctctgtcttatgattcatttgttgttccagatagcaatatttgtgggtgttctgtcattcagcatcgcagtcctgaacaaagtagatrttggattggatcagtctctttcgatgccagatgtaagatgacttccttttttttttttttttaacttctttagctgatgatgaatacatttttcaaaaca

SEQ ID NO: 19684 - DNA, 201 bp, Homo sapiens
actacacttcttccaaggggcagaacatggtgtgcggcggcatgggctgcaacaatgattccctggtgcagcagatatttaacgcggcgcagctggacaaytagtcagtaccaccttgtcttgtacttcagaagcagcggaggaggctctcagccaggcagtcagctcaggcctgaaatgtctcactgaaaatagactttc

SEQ ID NO: 19685 - DNA, 201 bp, Homo sapiens
gatcacgccactgcactccagcctgggctacagagcaagactctgtctcaaaataaaaaaaaaaagaagccagtctgggagagaacaagctaaacctttgstgttcccttatctgggggccttcttcatccctgaaatgtacagctgggtctgacctctgagtccagggtcaggtgattttgcttagcctcaagtgctcag

SEQ ID NO: 19686 - DNA, 201 bp, Homo sapiens
gctacagataatttagtcttgggtcaactttctcctctccctctacaagggaaatgttcaaaagtgtttagactttggtgatgcagcatgattgggaaagyagagggcacagaaagatgccaggctttgtggtctccaggcaagctcaggaatgtgacaaagcataccgaaaagaaaagcgggctgggagcagtggctcac

SEQ ID NO: 19687 - DNA, 201 bp, Homo sapiens
tggacctccgcttgacatacagatactgcaccaggtaacctgctgtttgaagaaataagtcactctagatgaccttgtggtttgctggcttttacatgttkactactgctagatggggatttggggctgaatgtcatggtatatcttgaaaatcttagcgtataatggcaaagctgcctttaagttaggtttcaagaaagt

SEQ ID NO: 19688 - DNA, 201 bp, Homo sapiens
gcctttcttccggacggagcagctcatcatccgggcccctctcactgacaaacacatttaccagccatacccttcgggagctgatgtaccctttggacctycgcttgacatacagatactgcaccaggtaacctgctgtttgaagaaataagtcactctagatgaccttgtggtttgctggcttttacatgttgactactg

SEQ ID NO: 19689 - DNA, 201 bp, Homo sapiens
agacagggagaaatattaatccgtgagtggctcccagtaagaccatggccaaatacatcctgaagtagaatatctggaaaatttgagatttggcaaaagcsaacaccacaatccctccaaattttgtaagtgtgattccactgaacacctaaaagaagagatactgtgttagaaaccacttttaccaacctgtaattgaac

SEQ ID NO: 19690 - DNA, 201 bp, Homo sapiens
cagtgggcttttctttgagtttaagtataatacaaaattttggatgtttttaattgagatttgtactcaacacaattcctttctgtagattttccagtccrtgggatggagcccatgaacaatgccaccaaaggctgtgacgagtctgtggatgaggtcacagcaccatgtagctgccaagactgctctattgtctgtggc

SEQ ID NO: 19691 - DNA, 201 bp, Homo sapiens
tatgtgtgagatcatgcagaatataatttacttttcctttagatgtccatcctgtttttataacctactgaacctgttttgtgagctgacatgtagccctygacagagtcagtttttgaatgttacagctactgaagattatgttgatcctgttacaaaccagacgaaaacaaatgtgaaagagttacaatactacgtcgg

SEQ ID NO: 19692 - DNA, 201 bp, Homo sapiens
tttaattgagatttgtactcaacacaattcctttctgtagattttccagtccatgggatggagcccatgaacaatgccaccaaaggctgtgacgagtctgkggatgaggtcacagcaccatgtagctgccaagactgctctattgtctgtggccccaagccccagcccccacctcctcctgctccctggacgatccttggc

SEQ ID NO: 19693 - DNA, 201 bp, Homo sapiens
atccatcagtcagtacctgcatgcgggtccgcctgtgtactttgtcctggaggaagggcacgactacacttcttccaaggggcagaacatggtgtgcggcrgcatgggctgcaacaatgattccctggtgcagcagatatttaacgcggcgcagctggacaactagtcagtaccaccttgtcttgtacttcagaagcagcg

SEQ ID NO: 19694 - DNA, 201 bp, Homo sapiens
ccagctttatcttacatattccctgtccctgccctgcaaggagctctggttccttttattggagaatggtatgtagaaacgaagatctgggcactaggtaygctcattgctgctggaaagagtagcatgtttttgtttgtttgtttgtttttttgagatggagtcttgctctgtcaccaggctggaatgcagtggcgcgat

SEQ ID NO: 19695 - DNA, 201 bp, Homo sapiens
tcagagtgttcacactctctcctattcttttatctttctttcaggactcctacatggtggattatttcaaatccatcagtcagtacctgcatgcgggtccrcctgtgtactttgtcctggaggaagggcacgactacacttcttccaaggggcagaacatggtgtgcggcggcatgggctgcaacaatgattccctggtgc

SEQ ID NO: 19696 - DNA, 201 bp, Homo sapiens
atattttgttcctcctgaaactcaaccactgattttagcattcattgttgggtcttgtctgcaacagttataactaaggtgtttgcctgatagtgattttyttctctttccctctcttcctctgcatttactaactggacttctgtacagaaagctatcccttctccctcatttatttactcagttatttacatcatggac

SEQ ID NO: 19697 - DNA, 201 bp, Homo sapiens
aatatcttgggggaagatgctttgagactatactaatattttgttcctcctgaaactcaaccactgattttagcattcattgttgggtcttgtctgcaacmgttataactaaggtgtttgcctgatagtgatttttttctctttccctctcttcctctgcatttactaactggacttctgtacagaaagctatcccttctc

SEQ ID NO: 19698 - DNA, 201 bp, Homo sapiens
agcaccctggggccctggggggaagactggtggtgttaggaatcatgagtccagctggaggcatctcagccaggaacctcctggcaccctcttattctccrtgatcctcgccttgcttagttactatcagagtgttcacactctctcctattcttttatctttctttcaggactcctacatggtggattatttcaaatcca

SEQ ID NO: 19699 - DNA, 201 bp, Homo sapiens
tacttagaaaattgcaccccgccccaggagctctccgaccagtgccttttgcctcctatgtggttatcaggtacttttaatcattaaagatgagagcactygagaaggtattcatggaaaatagaacagtgtatccgtactctcagatatgagccctgcttcagataggggagcactgaggtccaagaaaagaagttgtga

SEQ ID NO: 19700 - DNA, 201 bp, Homo sapiens
gcaaaatatcgcaaggacaaaaaaccaaacaccgcatgttctcactcataggtgggaattgaacaatgagaacacatggacacaggaaggggaacgtcacrcaccggggactgttgtggggtgggggcctgggggagggatagcattaggagatatacctaatgctaaatgacgagttaatgggtacaacacatcaacatg

SEQ ID NO: 19701 - DNA, 201 bp, Homo sapiens
aaaagaatgcctcaggatagaattccctttcagtaatgtccttctattgtgccacccttttaagatgagaactcttacctatgtaactgagtaagacaggyagaaatattaatccgtgagtggctcccagtaagaccatggccaaatacatcctgaagtagaatatctggaaaatttgagatttggcaaaagccaacacca

SEQ ID NO: 19702 - DNA, 201 bp, Homo sapiens
accatgcctgcatgcctgactaatttttgtatttttagtagagacggggtttcaccgtgttggccaggctgatctccaactcctgacctcaggtgatctgmccgccttggcctcccagagtgctgggattacaggagtaagccaccgtgcccagccggccactcattctttagaaagtcagagtcaaggccaggctcagtg

SEQ ID NO: 19703 - DNA, 201 bp, Homo sapiens
agctgccaagactgctctattgtctgtggccccaagccccagcccccacctcctcctgctccctggacgatccttggcttggacgccatgtatgtcatcakgtggatcacctacatggcgtttttgcttgtgttttttggagcattttttgcagtgtggtgctacaggtaagcagttttgtttgtcatccagggcaaaaag

SEQ ID NO: 19704 - DNA, 201 bp, Homo sapiens
ccagccaactagctccctttctcctgcagaaataagaaaaagtctctctctctcatagggccatcagtaaataaagccaaaagttgtgccactgaagagcratacaaaggaacagagcgcgaacggcttctaaatttctagccctctcgcagggcatcctgactgaactgtgtctaagggtcggtcggtttaccactggac

SEQ ID NO: 19705 - DNA, 201 bp, Homo sapiens
gactcaccacattacaaggagccagaataagctggaacaaagtcagcacttctgtgtttctttcacatagagaatcatcaaatagacccactagtggggckgtctgccccatgtctgaagtgtagtaagagcaaagtgactctgtccactataggggaggctggactggaatcactcagtccaaagaagaccatccacggg

SEQ ID NO: 19706 - DNA, 201 bp, Homo sapiens
ttctgtagattttccagtccatgggatggagcccatgaacaatgccaccaaaggctgtgacgagtctgtggatgaggtcacagcaccatgtagctgccaasactgctctattgtctgtggccccaagccccagcccccacctcctcctgctccctggacgatccttggcttggacgccatgtatgtcatcatgtggatcac

SEQ ID NO: 19707 - DNA, 201 bp, Homo sapiens
agtgattgttctaccttagcctcctgagtagctaggactacaggcatgcactaccatgtctagctaattttatttatgtttttctttatttttttttttttgagacagactcttgctctgtcaccgaggctggagtacagtggcatgatctcagcttactgcaacctcctcccgggttcaagcgattctcctgcctcagcc

SEQ ID NO: 19708 - DNA, 201 bp, Homo sapiens
agcaaagtgcttgctgcctttcttcatctcgagactgtccttgatccttttacttctatggccacttcaccttgcacaaaaatgacccacggttgaaagarcaatactgatttgcttcatttatagctttgtcactaaattgaagcactgaagtagaagattaagaaaatgaggggctttttatcatctccgggggataga

SEQ ID NO: 19709 - DNA, 201 bp, Homo sapiens
ttgtctcctttttcctttgggtttcctcttctagcaatgtacaatgcctgccgggatgtggaggccccctcaagtaatgacaaggccctgggactcctgtrtgggaaggacgctgacgcctgtaatgccaccaactggattgaatacatgttcaataaggacaatggacaggcaccttttaccatcactcctgtgttttca

SEQ ID NO: 19710 - DNA, 201 bp, Homo sapiens
cgacctcctgagctcaagcaatctctcaactcagcgtcccaagtagctgggactacaggcacatgccacaacccctggctaattttttaaaaatttgtttggggagatggggcttcaccatgttgcctagcctggtctcaaactcctaggctcaagcaatccaccctcctcagccttcctaagtactgggagtacaggcat

SEQ ID NO: 19711 - DNA, 201 bp, Homo sapiens
acctgccttggcttcccaaagtgctgggattataggcgtgagccaccacttccagccaggatgacttttttttttttttttttttttttttggtcttctcwgctgtgtctctagaagatgaccttttgagaagcaaacctgaatgttgattcaagcccaaatttcctgggctcaggtgttaattttttaagtctttggaac

SEQ ID NO: 19712 - DNA, 201 bp, Homo sapiens
ggccatggcaccagggtcggagccacgtacttcatgacctaccacaccgtgctgcagacctctgctgactttattgacgctctgaagaaagcccgacttayagccagtaatgtcaccgaaaccatgggcattaacggcagtgcctaccgagtatttccttacaggtaaagcctgccctttttcaatggggtttacccagca

SEQ ID NO: 19713 - DNA, 201 bp, Homo sapiens
tcgacctcctgagctcaagcaatctctcaactcagcgtcccaagtagctgggactacaggcacatgccacaacccctggctaattttttaaaaatttgtttggggagatggggcttcaccatgttgcctagcctggtctcaaactcctaggctcaagcaatccaccctcctcagccttcctaagtactgggagtacaggca

SEQ ID NO: 19714 - DNA, 201 bp, Homo sapiens
ctggtcaggtattttgtagcatgtccttccatttggctttatctggtattttctcatgatgagattgaaataaggtgttttgacaagtacatcacagaagycatgttatgtctttctcggtgcatcatgtcagggatccctgatgttgatgcgtctctttcctggtgatgttaaccttgatcacttgctcaaggtgatgtc

SEQ ID NO: 19715 - DNA, 201 bp, Homo sapiens
tgctcaatactatgagtcatcagggaaatacaaatcaaaaccacaatgagataccacttcacacccaccaggatggctagaatcaaagtcacataacaagmagtgttgacaaggctgtggaaaataggaacctttattaaaaagaaatccaaaaaccaaaaacagctgggcacagtggctcatgcctataatccagcactt

SEQ ID NO: 19716 - DNA, 201 bp, Homo sapiens
accacttacaaccataatttggtacaatcgtttcaaaactacttgaaaaacaactttgcagtacgtagtaagttgaagctaaccctcctcccagaaatttsacttatagatgcctgccttagagaaactctaaatgcatataaacctggagacccatataagaacacccactgtaacactattgtgattgtgaaaaattga

SEQ ID NO: 19717 - DNA, 201 bp, Homo sapiens
ctcgacctcctgagctcaagcaatctctcaactcagcgtcccaagtagctgggactacaggcacatgccacaacccctggctaattttttaaaaatttgtttggggagatggggcttcaccatgttgcctagcctggtctcaaactcctaggctcaagcaatccaccctcctcagccttcctaagtactgggagtacaggc

SEQ ID NO: 19718 - DNA, 201 bp, Homo sapiens
gagcgcgcggaagaggcacttgcccacatgggcagctccgtgagtaccctgagcagggccacgccggcagagtcgcaccacaaagtaatcctcctcagtgrctgaagagtctggatcctgtacttacaaagcagcttctaaggattgcaagctttcaggcaattcatgaattagctgccacatcgtggacagaacggacgt

SEQ ID NO: 19719 - DNA, 201 bp, Homo sapiens
tcagcctgggaagtggaggttgcagtgagctgagatcacaccattggactccagcctgagggacagagactccatctccaaaaaaaaaaaaaaaaaaaaaactcttactactcaatgataaataaataacccaatttaaaatggcaaaagatctgaatagagtagacatttctctaaggaagatatacaaatgaccaacaa

SEQ ID NO: 19720 - DNA, 201 bp, Homo sapiens
tgtgtgtgtgtaagtatttttttattttttggaagagacgggcctcactgtgttggtgaggctggtcttgaactcctggccttaagtgatcctcctgcctyggcctgccaaagtgttgggactgtaggtgtgagccaccacacctggcctatagtgcattattatttttatttagtttttaaattatgccatagccagttg

SEQ ID NO: 19721 - DNA, 201 bp, Homo sapiens; identical to SEQ ID NO: 5130

SEQ ID NO: 19722 - DNA, 201 bp, Homo sapiens
cctcgacctcctgagctcaagcaatctctcaactcagcgtcccaagtagctgggactacaggcacatgccacaacccctggctaattttttaaaaatttgtttggggagatggggcttcaccatgttgcctagcctggtctcaaactcctaggctcaagcaatccaccctcctcagccttcctaagtactgggagtacagg

SEQ ID NO: 19723 - DNA, 201 bp, Homo sapiens
tgagatagcaactaatgctttccctgttccgactttcaggaacggcttggctcttaacctccaccttcccttcctctcccgttcttccaggagaggcgtcytgctgtgaccctgtcagcgcagcatttgagggctgcttgaggcggctgttcacacgctgggggtctttctgcgtccgaaaccctggctgtgtcattttct

SEQ ID NO: 19724 - DNA, 201 bp, Homo sapiens
accgcgaaggtctgcagcttcactcctgagccagcgagatcacgaacccaccagaaggaagaaactccgaaaacatctgaacatcagaagggacagattcyagacgcgccaccttaagagctgtaacgctcaccgccagggtccgcggcttcattcttgaagtcagtgagaccaagaacccaccaattccggacacaatgt

SEQ ID NO: 19725 - DNA, 201 bp, Homo sapiens
aggtcagtaaccctgtctgtcctctctagtacccgaataggcttcgccccctcgtcctggatcgacgattatttcgactgggtgaagccacagtcgtcttrctgtcgagtggacaatatcactgaccagttctgcaatgcttcaggtaccttctcctttaccaaatctttcctgttttgctgaaaaattttcaaattatca

SEQ ID NO: 19726 - DNA, 201 bp, Homo sapiens
ctgcttttatgagctgtaacactcaccgcgaagatctgcagcttcactcctgagcccagcgagaccacgagcccactgggaggaacgaacaactccagacrcgctgccttaagagctgtaacactcaccgcgaaggtctgcagcttcactcctgagccagcgagatcacgaacccaccagaaggaagaaactccgaaaaca

SEQ ID NO: 19727 - DNA, 201 bp, Homo sapiens
ctttgctgagcagataggtagctgagggcaggggtctcatatgtgtccccaggtgggcttgattcctgccatgagatagcaactaatgctttccctgttcygactttcaggaacggcttggctcttaacctccaccttcccttcctctcccgttcttccaggagaggcgtcctgctgtgaccctgtcagcgcagcatttga

SEQ ID NO: 19728 - DNA, 201 bp, Homo sapiens
aggattgtaaatacaccaatcggcactctgtatctagctcaaggtttgtaaacacaccaatcagcaccctgtgtttagctcaaggtttgtgagtgcaccartcgacactctgtatctagctgctctggtggggccttggagaacctgtgtgtggaaactctgtatctaactaatctgatggggacgtggagaacctttgta

SEQ ID NO: 19729 - DNA, 201 bp, Homo sapiens
cttgtgaataaatagtaaatgtgtagccttttaaaataattctataataactttgcaaatacaggatgtgtcttacccttttgtacttcaaaaggattacrtgaatgaatgtgtcttagttcactgaggaatgttgaccttactctaactgttgcctactcccgtgtctgtgctctttcacctgaaaggaactctgtccag

SEQ ID NO: 19730 - DNA, 201 bp, Homo sapiens
aaatacaccaatcggcagtctatctagctcaaggtttgtaaacacaccaatcagcaccctgtgtttagctcaaggtttgtgagtgctccaatcgacactctgtatctagctgctctggtgaggacgtggagaacctttatgtctagctcaaggtttgtaaacacaccaatcagcaccctgtgtttagctcaaggtttgtga

SEQ ID NO: 19731 - DNA, 201 bp, Homo sapiens
tgatggcagtgatcagctgcggccagccaggtttttcttcatctggactgtgcctctcactttcaaatttttggaacatttgctttggcaacaaaactttyaaaaaaccaactctctctggtgcaggtgttctgttggaggatttgagagaagctttaaaattttatcttattactgtcccttgcttaggtcacaagagga

SEQ ID NO: 19732 - DNA, 201 bp, Homo sapiens
actcgttaaaccaaatcaggatgagagtgcctccggggaattgtgtccttgtgcacattaacgcccctcacataggtgtggcgtcaataggaagtggtgartcaggggagagggggttccgtggactagaaaaaactctccttcgacttctatttagttctcagaaggggataggtgatgttgatccaataatggactaag

SEQ ID NO: 19733 - DNA, 201 bp, Homo sapiens
cctgccaaagtgttgggactgtaggtgtgagccaccacacctggcctatagtgcattattatttttatttagtttttaaattatgccatagccagttgttytgaatagtgcagtactacaaaacagagtcaaggtctcatgctgtcacccaggctggaatacagtgatgcaatcatggctcactgcagcctcaacctccta

SEQ ID NO: 19734 - DNA, 201 bp, Homo sapiens
taaatacaccaatcggcagtctatctagctcaaggtttgtaaacacaccaatcagcaccctgtgtttagctcaaggtttgtgagtgctccaatcgacactctgtatctagctgctctggtgaggacgtggagaacctttatgtctagctcaaggtttgtaaacacaccaatcagcaccctgtgtttagctcaaggtttgtg

SEQ ID NO: 19735 - DNA, 201 bp, Homo sapiens
aaacaattttgcatcataattacttagaaaatacccgggagggggtgggggaggaggaccctttgtcatactccatgtaactcaccatcgcataactctgstcggcatccaggtactttttatactcatggttgagtttatcaaaaacagtggctatcacgggcagcgatgctctgtctgactcacttaacactggaaagg

SEQ ID NO: 19736 - DNA, 201 bp, Homo sapiens
acataaggtttctcatcctgttctaactccagcgattgcctctcaggattggtatctggccttagcttctcagaggagggcttttctttatcactttaccytgtggttttgtaggagcgtcgaggttgccctggaattttcttaataaaaacatagaagccccgggctctgaccagtcaaggccatacttgaaggaggaga

SEQ ID NO: 19737 - DNA, 201 bp, Homo sapiens
attgtgtttaccttagggaaggggctactgtcagggaggggtaattggggagcttcaactgaatctatagagtgtgtgtgtgtgtgtaagtatttttttawtttttggaagagacgggcctcactgtgttggtgaggctggtcttgaactcctggccttaagtgatcctcctgcctcggcctgccaaagtgttgggactgt

SEQ ID NO: 19738 - DNA, 201 bp, Homo sapiens
ggattgtgtttaccttagggaaggggctactgtcagggaggggtaattggggagcttcaactgaatctatagagtgtgtgtgtgtgtgtaagtatttttttattttttggaagagacgggcctcactgtgttggtgaggctggtcttgaactcctggccttaagtgatcctcctgcctcggcctgccaaagtgttgggact

SEQ ID NO: 19739 - DNA, 201 bp, Homo sapiens
ggctgtctggcattctgactgagcccctctgggcacagctgcagaacacgaataactagtcttatgaggttactttatgagatgctctcctgattgtgggkctagcaggaggagcaccctggggccctggggggaagactggtggtgttaggaatcatgagtccagctggaggcatctcagccaggaacctcctggcaccc

SEQ ID NO: 19740 - DNA, 201 bp, Homo sapiens
aggattgtgtttaccttagggaaggggctactgtcagggaggggtaattggggagcttcaactgaatctatagagtgtgtgtgtgtgtgtaagtatttttttattttttggaagagacgggcctcactgtgttggtgaggctggtcttgaactcctggccttaagtgatcctcctgcctcggcctgccaaagtgttgggac

SEQ ID NO: 19741 - DNA, 201 bp, Homo sapiens
tgcgggtggggtgaccttaacgggttccagcaatttctcctggtcaacacaaacgtgccacagaaaaccaggcttttggctgtgtgtagagagggccccaraaagttcctggtacagtaagattggtgtgatggaggccttgtaagtccaatgggatgcttggcctcctctagcacccagggtgccctgggtaattagcac

SEQ ID NO: 19742 - DNA, 201 bp, Homo sapiens
caggattgtgtttaccttagggaaggggctactgtcagggaggggtaattggggagcttcaactgaatctatagagtgtgtgtgtgtgtgtaagtatttttttattttttggaagagacgggcctcactgtgttggtgaggctggtcttgaactcctggccttaagtgatcctcctgcctcggcctgccaaagtgttggga

SEQ ID NO: 19743 - DNA, 201 bp, Homo sapiens
tggtgaaatccccctcatcctcggagctctgggtctgtacagtctcttcctcttggctataattttgccttttagtgtttgctccctcctctgtgcctgcrtagcgccatgcaccatgtgccattgatggcactgggctgtatttgcctgcctcttgcccagtgattctgagctcccaaaggtgagtgctgagctgtatta

SEQ ID NO: 19744 - DNA, 201 bp, Homo sapiens
tggtgtgggctgtctggcattctgactgagcccctctgggcacagctgcagaacacgaataactagtcttatgaggttactttatgagatgctctcctgaytgtggggctagcaggaggagcaccctggggccctggggggaagactggtggtgttaggaatcatgagtccagctggaggcatctcagccaggaacctcct

SEQ ID NO: 19745 - DNA, 201 bp, Homo sapiens
tcaggattgtgtttaccttagggaaggggctactgtcagggaggggtaattggggagcttcaactgaatctatagagtgtgtgtgtgtgtgtaagtatttttttattttttggaagagacgggcctcactgtgttggtgaggctggtcttgaactcctggccttaagtgatcctcctgcctcggcctgccaaagtgttggg

SEQ ID NO: 19746 - DNA, 201 bp, Homo sapiens
ttttttagagatgggatcttgctatgttgtccaggctggactcaaactcctgggttatagccatccttctgcctcagcttcctgagtacttgagattaggygtgccaccatacccggcatacaggacttgccaaaccaccatcttgctctcattccctctcactgttctctctccctccctttttcctcccacagttgtaa

SEQ ID NO: 19747 - DNA, 201 bp, Homo sapiens
tcaagaccagccggggcaacatggtgaaacaccgtcttaaaaacattttgtttttcttttcattgttgaggttgaggctgctgtgagctgtgatcacgccrgtgtactccagcctgggcaacagagcaagaccctgtgtcaaaacaaaaaagagagagaaataaataatagcaattatgtgccgtagagaaaatgtggcta

SEQ ID NO: 19748 - DNA, 201 bp, Homo sapiens
tgagctgtgatcacgccagtgtactccagcctgggcaacagagcaagaccctgtgtcaaaacaaaaaagagagagaaataaataatagcaattatgtgccktagagaaaatgtggctattctgtttccctagagttttttaaaatttatttttaaaatttatttattttagagacaggttcttgctctgttgcccaggcgt

SEQ ID NO: 19749 - DNA, 201 bp, Homo sapiens
aaaaatgatgggggacagaggtgcgtgagccttgtgtttcctcaaagcggacgtggttcccaccagtgtggaagcggtacagggagtggcaggctcctggyggcagggacctgaattggtttgtagttatgcttgtgcgcgtcctcataaccccagtctcgccctagcgctgtcccctttcctctccctccagcttttcct

SEQ ID NO: 19750 - DNA, 201 bp, Homo sapiens
agaacatggtgtgcggcggcatgggctgcaacaatgattccctggtgcagcagatatttaacgcggcgcagctggacaactagtcagtaccaccttgtctygtacttcagaagcagcggaggaggctctcagccaggcagtcagctcaggcctgaaatgtctcactgaaaatagactttcttggaaaagttgtttttatgc

SEQ ID NO: 19751 - DNA, 201 bp, Homo sapiens
cagctctccagtcaaattgaactgcttgctagcaaaatcctgcccatcttccagggccccatttcacatgctacattatctacgacattcttgtcctgttsccctaactagaatgccttccctctgaagttctgaatctttatttaaactgctgcaacagcatttgctgcctcattaaaagaccttggtgtgggtcttgac

SEQ ID NO: 19752 - DNA, 201 bp, Homo sapiens
actctaatcacatgaagtctcctcgttttcagcaacttccttgttttgagcattctcagtccagaagaggcggaaagctgcggcccaccttcttttccacraaggctgacaggacatgggtgtacacatctgactggtccagcaccgcctgggtccgcaccggcctcttgaggagcgggctgcttcggctctgccctgctt

SEQ ID NO: 19753 - DNA, 201 bp, Homo sapiens
ctgtcccccaggctgaagtgtagtggtttgattgtggctcactgaagtgttgaccctgggctcaagctatccttccacctcagcctcccacgtagctgggrctgcaggtgcatgccaccatgcccaactaatttttaaattttttgtagacacaaggtcttgctgtgttgcccaaggtggtcttgaattcctgggctggag

SEQ ID NO: 19754 - DNA, 201 bp, Homo sapiens
agtgttcacactctctcctattcttttatctttctttcaggactcctacatggtggattatttcaaatccatcagtcagtacctgcatgcgggtccgcctrtgtactttgtcctggaggaagggcacgactacacttcttccaaggggcagaacatggtgtgcggcggcatgggctgcaacaatgattccctggtgcagca

SEQ ID NO: 19755 - DNA, 201 bp, Homo sapiens
tgtggaactgtacctgttggtacggctcctttttaggtggcagtgtgctgaagcaggaaaataacagacaagttaaacatgagacagctggcagtctttcycatttaaaatgcaggggagcccgggccagaacccagcgtgtgatgtgcggttggtgcctggagagtcgtcttggttcaactctacaccctggcttagcct

SEQ ID NO: 19756 - DNA, 201 bp, Homo sapiens
ggtggaccagtgttcccgtggcttgtgttgggaggctatgatggtaagtaagagaagctttgacttttccttttagataaagtcatctcggttttgtcatyagcatcaagtggtaattatgaagatttcataaattgggcagttttgttaatttcttacctcttgaatcccagaatagtatctcctttggctttgggtttg

SEQ ID NO: 19757 - DNA, 201 bp, Homo sapiens
taaatacccatttcctttgatccaacaatataaaagtatttccaacagttctatttgcgcatgattgcaaagatttacatccaagaatgggccaggagtgstggctcacgcctgtaatcccagcactttaggaggctgaggcaggcagattgcttgagcccagcagttcaagaccaatctgggcaacatggtgaaaccccg

SEQ ID NO: 19758 - DNA, 201 bp, Homo sapiens
cttctttcaggttcttgacttacaaatagccatcgaaaacattactgcctcttatgacaatgagactgtgacacttcaagacatctgcttggcccctcttycaccgtataacacgaactgcaccattttgagtgtgttaaattacttccagaacagccattccgtgctggaccacaagaaaggggacgacttctttgtgta

SEQ ID NO: 19759 - DNA, 201 bp, Homo sapiens
ctcaacacaattcctttctgtagattttccagtccatgggatggagcccatgaacaatgccaccaaaggctgtgacgagtctgtggatgaggtcacagcaycatgtagctgccaagactgctctattgtctgtggccccaagccccagcccccacctcctcctgctccctggacgatccttggcttggacgccatgtatgt

SEQ ID NO: 19760 - DNA, 201 bp, Homo sapiens
ctgctcctgctcctccgctcctcctgcgcggggtgctgaaacagcccggggaagtagagccgcctccggggagcccaaccagccgaacgccgccggcgtcmgcagccttgcgcggccacagcatgaccgctcgcggcctggcccttggcctcctcctgctgctactgtgtccagcgcaggtgagcggtcgccggccaccgg

SEQ ID NO: 19761 - DNA, 201 bp, Homo sapiens
cttgtctcctttttcctttgggtttcctcttctagcaatgtacaatgcctgccgggatgtggaggccccctcaagtaatgacaaggccctgggactcctgkgtgggaaggacgctgacgcctgtaatgccaccaactggattgaatacatgttcaataaggacaatggacaggcaccttttaccatcactcctgtgttttc

SEQ ID NO: 19762 - DNA, 201 bp, Homo sapiens
ggatcacctacatggcgtttttgcttgtgttttttggagcattttttgcagtgtggtgctacaggtaagcagttttgtttgtcatccagggcaaaaagagsaaaattgcccactggcactttgagctttcatttgtcagagcttggttacttaggacaagaaacaaatacctccatgaataccattgcatggattattgtg

SEQ ID NO: 19763 - DNA, 201 bp, Homo sapiens
ctggactctcttgacacccaggattctttcctcaggggacatgctgcctatagttctgcagttaacatcctccttggccatggcaccagggtcggagccaygtacttcatgacctaccacaccgtgctgcagacctctgctgactttattgacgctctgaagaaagcccgacttatagccagtaatgtcaccgaaaccatg

SEQ ID NO: 19764 - DNA, 201 bp, Homo sapiens
gatacagagaagctccagagggcccaggcctgggaaaaagagtgagtcactcatgggtgtgagcagactgtccttgcattgtgggaagctagacacttgcrgcaagcacttaaacttcattttctaaattaaccaatggcagatctgagttacgtagttttgttcacttggtactaatgatgctaagaagaaactgtaaac

SEQ ID NO: 19765 - DNA, 201 bp, Homo sapiens
cgggctttcaccatgttggccaggctagtctcgaactcttgacctcaggtgatctgccagcctcagcctcccaaagtgctggaattacaggcataagccaytgagcccagccctaaacttactttaattcagcatgtatggaaccttagctgtaatctgatagtctccagtgtggaagaccctaatgcagtggctgggcat

SEQ ID NO: 19766 - DNA, 201 bp, Homo sapiens
tttaccttagggaaggggctactgtcagggaggggtaattggggagcttcaactgaatctatagagtgtgtgtgtgtgtgtaagtatttttttattttttkgaagagacgggcctcactgtgttggtgaggctggtcttgaactcctggccttaagtgatcctcctgcctcggcctgccaaagtgttgggactgtaggtgt

SEQ ID NO: 19767 - DNA, 201 bp, Homo sapiens
agtatgcctaagatgaaaatggtatttcagattcattaaactgtgaaagtgacatgtggctgaagcttttagataaggggaaagattatccctcactagtraggaaagtaatcgatagagaagaaagtaatgcccctcactgtcagtattttaaaatgttttacaaaaaatctggagacctattcttctaacagtcctccc

SEQ ID NO: 19768 - DNA, 201 bp, Homo sapiens
tgaggctggtcttgaactcctggccttaagtgatcctcctgcctcggcctgccaaagtgttgggactgtaggtgtgagccaccacacctggcctatagtgsattattatttttatttagtttttaaattatgccatagccagttgttctgaatagtgcagtactacaaaacagagtcaaggtctcatgctgtcacccaggc

SEQ ID NO: 19769 - DNA, 201 bp, Homo sapiens
accacgaccatgccattattattacattattattagctaaaccagagatcttaatcagatttcaccagctttttctctaatgcccttccctgtttcaaggycccatattacatttttgtgttttatgagtcccctctaatctgtgacagaaagttcctcagtctttccttttctggccttaacactcttgatgatactggt

SEQ ID NO: 19770 - DNA, 201 bp, Homo sapiens
ccaaaggtttggagtcgctgaggacgtggtactgcaggaactgatgcagcatataaaagaggttgtgctggacaagggttttgataacaagttcatgtagrtaatgctgaggacaaaagtaaaaagtgaaagaacacttccaaatcattcagctacaacagactagaggctccccaaggactggctattctaaccaacaca

SEQ ID NO: 19771 - DNA, 201 bp, Homo sapiens
tagcattcattgttgggtcttgtctgcaacagttataactaaggtgtttgcctgatagtgatttttttctctttccctctcttcctctgcatttactaacyggacttctgtacagaaagctatcccttctccctcatttatttactcagttatttacatcatggacttttaattctgtgggttgtatccaacactgtcatt

SEQ ID NO: 19772 - DNA, 201 bp, Homo sapiens
cagggcagggttgaacctcacccttcagaggctcctgtgtcggcatctcctctgtggggtgggaatagcgctcattgagggcagccaacaaaggtggcttygctgagcagataggtagctgagggcaggggtctcatatgtgtccccaggtgggcttgattcctgccatgagatagcaactaatgctttccctgttccgac

SEQ ID NO: 19773 - DNA, 201 bp, Homo sapiens
ttgatgaacacataacatgtgctatcgtgccagctagagattagtgctatgaggagaaaaataaggctggacagagtggggggtgcattgcttaagcgtgragatgtgcacaaagggagaggaaaggacagctgggcacatcacagggatgagagttcccggcagaaccagcagcaagtgcagagccctggcaggaagctc

SEQ ID NO: 19774 - DNA, 201 bp, Homo sapiens
tggccctattatgtgtgagatcatgcagaatataatttacttttcctttagatgtccatcctgtttttataacctactgaacctgttttgtgagctgacaygtagccctcgacagagtcagtttttgaatgttacagctactgaagattatgttgatcctgttacaaaccagacgaaaacaaatgtgaaagagttacaata

SEQ ID NO: 19775 - DNA, 201 bp, Homo sapiens
cttcttttccacgaaggctgacaggacatgggtgtacacatctgactggtccagcaccgcctgggtccgcaccggcctcttgaggagcgggctgcttcggytctgccctgcttccaccgcctgaaagaaaaaaaccacaaactatgatcttcggcatcttagaggaagggtgctgtttacagttcatccacaaggactgaa

SEQ ID NO: 19776 - DNA, 201 bp, Homo sapiens
ggtttctaggtgatggcagtgatcagctgcggccagccaggtttttcttcatctggactgtgcctctcactttcaaatttttggaacatttgctttggcarcaaaacttttaaaaaaccaactctctctggtgcaggtgttctgttggaggatttgagagaagctttaaaattttatcttattactgtcccttgcttaggt

SEQ ID NO: 19777 - DNA, 201 bp, Homo sapiens
actaaagacttcctccctgtggagcaggtcagtaaccctgtctgtcctctctagtacccgaataggcttcgccccctcgtcctggatcgacgattatttcractgggtgaagccacagtcgtcttgctgtcgagtggacaatatcactgaccagttctgcaatgcttcaggtaccttctcctttaccaaatctttcctgtt

SEQ ID NO: 19778 - DNA, 201 bp, Homo sapiens
ggggcttcaccatgttgcctagcctggtctcaaactcctaggctcaagcaatccaccctcctcagccttcctaagtactgggagtacaggcatgagccacrgtacctgtcctcacttgctgctttcatcataattattaaaggtttcaactttccctggaattactaatagaaatagtaagtagcactctggttgaattga

SEQ ID NO: 19779 - DNA, 201 bp, Homo sapiens
ttggccatggtcttactgggagccactcacggattaatatttctccctgtcttactcagttacataggtaagagttctcatcttaaaagggtggcacaatrgaaggacattactgaaagggaattctatcctgaggcattcttttcaagtatttgaactcatactaatggtcatttgataatgataaatgatactgagtaa

SEQ ID NO: 19780 - DNA, 201 bp, Homo sapiens
agatcctctgtaattattccttaaatgttattgcagggtggaggtggagatgagactaacaggcttaagtcttatcccggactctcaaactctaacctgtrgcatacagtgcagagaaagaacaccgtaactccaaaggcttaatttttcaggggctgactttatacctctcataaagtttcccaatagcaggttgctatt

SEQ ID NO: 19781 - DNA, 201 bp, Homo sapiens
aaaacacaaaaattagccaggcatggtggcgtgcacctgtttaatcccagctactcaggaggctggggcaggagaatcacttgaacctgggagaaatcctygtaaggaagtgtttttgttcaattacaggttggtaaaagtggtttctaacacagtatctcttcttttaggtgttcagtggaatcacacttacaaaatttg

SEQ ID NO: 19782 - DNA, 201 bp, Homo sapiens
tgggctagtctgcctgtaatttgttattctttagagattgcacaagcctgtagcctgatgacagcaggatgttcactttttacttagaaaattgcaccccrccccaggagctctccgaccagtgccttttgcctcctatgtggttatcaggtacttttaatcattaaagatgagagcactcgagaaggtattcatggaaaa

SEQ ID NO: 19783 - DNA, 201 bp, Homo sapiens
ctgacaggacatgggtgtacacatctgactggtccagcaccgcctgggtccgcaccggcctcttgaggagcgggctgcttcggctctgccctgcttccacygcctgaaagaaaaaaaccacaaactatgatcttcggcatcttagaggaagggtgctgtttacagttcatccacaaggactgaattcttcgatgtggaccc

SEQ ID NO: 19784 - DNA, 201 bp, Homo sapiens
gaatgctagggacctggcctagggacatttgttcagccagttgagcaaccacagtggctatttcttcagcatgggaacagagaaattattcctttttgccyttaaggacactgctcagccgactacttctcaagagctaaggactctcacttctggttctaaagaactttgaccttgagttctgtttgtttgttactggag

SEQ ID NO: 19785 - DNA, 201 bp, Homo sapiens
ttattttgcatttgtctgtccattactcttcccagactggccccctccttcaggagcccccttggtgggcaccccatgctctaggacaggacatcttttcyttgaattattattattttttttttagagatgggatcttgctatgttgtccaggctggactcaaactcctgggttatagccatccttctgcctcagcttcc

SEQ ID NO: 19786 - DNA, 201 bp, Homo sapiens
aaccctccactcctaaaagggatgcagtattctaagcatggcagattacctacagcggaagcctggatcagtcatctctgatctcgggtgcccctttctgscctttgacctccagctctgtgaagggcatcagctctccagtcaaattgaactgcttgctagcaaaatcctgcccatcttccagggccccatttcacatgc

SEQ ID NO: 19787 - DNA, 201 bp, Homo sapiens
tttgacctccagctctgtgaagggcatcagctctccagtcaaattgaactgcttgctagcaaaatcctgcccatcttccagggccccatttcacatgctamattatctacgacattcttgtcctgttcccctaactagaatgccttccctctgaagttctgaatctttatttaaactgctgcaacagcatttgctgcctca

SEQ ID NO: 19788 - DNA, 201 bp, Homo sapiens
ggagatgactgtcaccctagttaacctgtctttccagaacaagggtaaaacaaaatgaatgtgtaagcatctccttgaagattagggaaagaagatcctgsgaagtttctagcaagcagagactggtaaatgagaatcgacagtacaggacccattccagctattttcttaggtgtaatacactgatactatccttatgta

SEQ ID NO: 19789 - DNA, 201 bp, Homo sapiens
aagatacaaaattttaaaatgtaatgtgcagaatagtattttactgtttgtgtggttaagagggaaaggggaagaatctgtgtgtttgcttgtgtgtgtgyggagtggctctggaaagattcgcagatggtcacagtatggggaggagaactaagacaatgaaacagatgttggagaaggagagaattttcgataaacact

SEQ ID NO: 19790 - DNA, 201 bp, Homo sapiens
gattcattttgcccaaaggtgccactaaaaaggcaaaaggtcaacacgtgtcccgctgctgtagaaggtggtctcagtcgtcctgtagacccgacgtgggyggagactcagtgcacgtgagagtgatgttcactggtccagtcccctgccgcctgtgttccgagtgttttcctgataatgtggctggctcagctttccctt

SEQ ID NO: 19791 - DNA, 201 bp, Homo sapiens
atagggtcttgcttttttgcccaggctggcctcaaactcctggcctcaggagatcttcccacagtgctgggattacaggtgtgagtcactgcacctggccragtccattatttttttaatgttgaggcaaatgttgtgaaatggtatgactgatagttaactgggtaatgaggaaatgagaattgtattattctccatgtg

SEQ ID NO: 19792 - DNA, 201 bp, Homo sapiens
tgaaaggaactctgtccaggattcttctttggcaatgtcagtctctgttgtgatgttcggcagcttcagacactaaaagacaacctgcagctgcctctacrgtttctgtccaggtaggttctgctggggaaacagaacaactgggctgtagatacttgtgaactggtaatgctcagctttccatttattctttgtttacat

SEQ ID NO: 19793 - DNA, 201 bp, Homo sapiens
caggcttctggtaagccggggggggggtggtgtatgttctagaggttaacagcagtgcacagtgtaacgtcatatttttgcctctttattcttattccatyatgtttaaaactgccataaattcccccatgttttaattgtatgtaacgtttctgttgcctacatctattttcttcattccaactttttggtttatcttaa

SEQ ID NO: 19794 - DNA, 201 bp, Homo sapiens
tgtgggaaggacgctgacgcctgtaatgccaccaactggattgaatacatgttcaataaggacaatggacaggcaccttttaccatcactcctgtgttttmaggtaggtataaagattccaagtttggtgtgtttatgatattgttttaaagccaaggaactggctgggcacagtggctcaccagtgcttggggagactga

SEQ ID NO: 19795 - DNA, 201 bp, Homo sapiens
tgcaccattttgagtgtgttaaattacttccagaacagccattccgtgctggaccacaagaaaggggacgacttctttgtgtatgccgattaccacacgcrctttctgtactgcgtacggtaagtggcaagagacaatcattggtagacaccattcttgggtctgacttagggtacatgggcaaaagcttgttttatgagc

SEQ ID NO: 19796 - DNA, 201 bp, Homo sapiens
cggctatactagtatacctgatggtgcctctgaccatggaaatgtgatttcctggcctagttctgggctagtctgcctgtaatttgttattctttagagaytgcacaagcctgtagcctgatgacagcaggatgttcactttttacttagaaaattgcaccccgccccaggagctctccgaccagtgccttttgcctccta

SEQ ID NO: 19797 - DNA, 201 bp, Homo sapiens
gttaaattacttccagaacagccattccgtgctggaccacaagaaaggggacgacttctttgtgtatgccgattaccacacgcactttctgtactgcgtayggtaagtggcaagagacaatcattggtagacaccattcttgggtctgacttagggtacatgggcaaaagcttgttttatgagcataacccagaggtgagc

SEQ ID NO: 19798 - DNA, 201 bp, Homo sapiens
atcacgccactgcactccagcctgggctacagagcaagactctgtctcaaaataaaaaaaaaaagaagccagtctgggagagaacaagctaaacctttggygttcccttatctgggggccttcttcatccctgaaatgtacagctgggtctgacctctgagtccagggtcaggtgattttgcttagcctcaagtgctcaga

SEQ ID NO: 19799 - DNA, 201 bp, Homo sapiens
tgctccttgggtgtcttcagctacattgggttgcccttgaccctcattgtgattgaagtcatcccgttcctggtgctggctgttggagtggacaacatctycattctggtgcaggcctaccaggtatacttccatattctcacagggctcagcatctgttcaagtttcagggactgtgaatggctcctgggctccgcattc

SEQ ID NO: 19800 - DNA, 201 bp, Homo sapiens
cggggttacatgaccagtaagtggcagggctgaggttgttcccagggcccttgccctttcctgcttcctattacacaacaggactgagtaaaccctgtacmtttgattatacatgaaaccaggtggagaaacagcagctatgtaccaaagaacccagagcaatcgagaaaagcccatctggccaggcgaagtggctcacac

SEQ ID NO: 19801 - DNA, 201 bp, Homo sapiens
ccctcttattctccatgatcctcgccttgcttagttactatcagagtgttcacactctctcctattcttttatctttctttcaggactcctacatggtggwttatttcaaatccatcagtcagtacctgcatgcgggtccgcctgtgtactttgtcctggaggaagggcacgactacacttcttccaaggggcagaacatg

SEQ ID NO: 19802 - DNA, 201 bp, Homo sapiens
gtagccaccgttcctggggagcctccagggtgccagcgtcatgccaggcactccctgacattattccatttctcatcacgcagcctatgagtaggtggtgktatacccatttacagaagaggagactggggctcagaggtggtcattttgctcggggttacatgaccagtaagtggcagggctgaggttgttcccagggcc

SEQ ID NO: 19803 - DNA, 201 bp, Homo sapiens
gaagggcacgactacacttcttccaaggggcagaacatggtgtgcggcggcatgggctgcaacaatgattccctggtgcagcagatatttaacgcggcgcmgctggacaactagtcagtaccaccttgtcttgtacttcagaagcagcggaggaggctctcagccaggcagtcagctcaggcctgaaatgtctcactgaaa

SEQ ID NO: 19804 - DNA, 201 bp, Homo sapiens
ccctgggcatgagaatgaacgcagattcctgtgcacattccaagcggggctgagggagaggacggcctgctggtaatccaggcctgaaggaacttggcctrttcacttgtactgatggcagctggggcgtgatcttagctttagtaacattatcccacattaaggttgcgattcttttagcctcgtcatgctccttgccag

SEQ ID NO: 19805 - DNA, 201 bp, Homo sapiens
ttcgactgggtgaagccacagtcgtcttgctgtcgagtggacaatatcactgaccagttctgcaatgcttcaggtaccttctcctttaccaaatctttccygttttgctgaaaaattttcaaattatcatttaaaaatcatttgcatcgtgcctcagtttatacctatttgtatatcaaagctgggtctccctgtgtcatc

SEQ ID NO: 19806 - DNA, 201 bp, Homo sapiens
gagtgcagtggcatgatctcagctcgctgcagcctctgccttccaggttcaagtgattctcgtgcctcagcctcccaagtagctgggattacaggcacctkccaccacgcctggctaatttttgtatttttagtagagacgggctttcaccatgttggccaggctagtctcgaactcttgacctcaggtgatctgccagcc

SEQ ID NO: 19807 - DNA, 201 bp, Homo sapiens
catattatatgattggatttatgtgaactgtctgaaatagtcagataaatagagacagttcagtggttgcttagggcttagggaagtagggaggtagttgwgcatagctagaatacaggatttcttttgaggtgatgaaaatgttataaaattgactatggtgatagttgcatatatctatgaatatgctaaactccatta

SEQ ID NO: 19808 - DNA, 201 bp, Homo sapiens
cccagcactttgggaggcccagacgagaggctcacttgaggccgggagttcaagaccagcctaggcaatgtttgcatgtctctaaaaaaaagaaaaaagaraatttaaaaagaaaaaaaagcgtacaattcagtagctttactatattcacgtgtatgtgcagccatcaccacagtcaattttaggaacattttcattact

SEQ ID NO: 19809 - DNA, 201 bp, Homo sapiens
atagcgccaccacacctggctaatttttttttatttttttattttttgtagagacggggttttgccatattgcccaggctggtctggacctcctgagctcwggcagtccacccaccagggcctcccaaattactgggattaaaggtgtgcataaccacccctggcccaaagacaaatatcttaaaagcaaatagagacaag

SEQ ID NO: 19810 - DNA, 201 bp, Homo sapiens
tggagcaggtcagtaaccctgtctgtcctctctagtacccgaataggcttcgccccctcgtcctggatcgacgattatttcgactgggtgaagccacagtygtcttgctgtcgagtggacaatatcactgaccagttctgcaatgcttcaggtaccttctcctttaccaaatctttcctgttttgctgaaaaattttcaaa

SEQ ID NO: 19811 - DNA, 201 bp, Homo sapiens
gatcttgctatgttgtccaggctggactcaaactcctgggttatagccatccttctgcctcagcttcctgagtacttgagattaggcgtgccaccataccyggcatacaggacttgccaaaccaccatcttgctctcattccctctcactgttctctctccctccctttttcctcccacagttgtaattgtgtgagacacc

SEQ ID NO: 19812 - DNA, 201 bp, Homo sapiens
acagggagaaatattaatccgtgagtggctcccagtaagaccatggccaaatacatcctgaagtagaatatctggaaaatttgagatttggcaaaagccakcaccacaatccctccaaattttgtaagtgtgattccactgaacacctaaaagaagagatactgtgttagaaaccacttttaccaacctgtaattgaacaa

SEQ ID NO: 19813 - DNA, 201 bp, Homo sapiens
accatggccaaatacatcctgaagtagaatatctggaaaatttgagatttggcaaaagccaacaccacaatccctccaaattttgtaagtgtgattccacrgaacacctaaaagaagagatactgtgttagaaaccacttttaccaacctgtaattgaacaaaaacacttccttacaaggatttctcccaggttcaagtga

SEQ ID NO: 19814 - DNA, 201 bp, Homo sapiens
gatagaattccctttcagtaatgtccttctattgtgccacccttttaagatgagaactcttacctatgtaactgagtaagacagggagaaatattaatccytgagtggctcccagtaagaccatggccaaatacatcctgaagtagaatatctggaaaatttgagatttggcaaaagccaacaccacaatccctccaaatt

SEQ ID NO: 19815 - DNA, 201 bp, Homo sapiens
tcaacaggaagagagccatcctaaaggaagtgctttatttcagagctgtggcatctccgtggagttctgcagccacataaccagagcgttcacggtgagcrtgaaaggcagccgcgtggagcgcgcggaagaggcacttgcccacatgggcagctccgtgagtaccctgagcagggccacgccggcagagtcgcaccacaa

SEQ ID NO: 19816 - DNA, 201 bp, Homo sapiens
gtcttcaaggggaaaccctggatcagcagctgggcagggtcctaggagaagtggctcccagtatgttcctgtcatccttttctgagactgtagcatttttyttaggtaattatgctttcaatcctaccagtcctgtagtctgctgagcctggagaaagaaggagctggctacctgaacatgtccctttgtgttgcttcctt

SEQ ID NO: 19817 - DNA, 201 bp, Homo sapiens
tgggaagtttctagcaagcagagactggtaaatgagaatcgacagtacaggacccattccagctattttcttaggtgtaatacactgatactatccttatrtaatgtgttgtgtgtatgtgtaagaaaataaaatccaaaaagataacagtattaggggttttttttgttttttttttttgtttttttgtgatggagtctt

SEQ ID NO: 19818 - DNA, 201 bp, Homo sapiens
cctcggcctcccaaagtgctgggattacaggcgtgagcttccatgcccagctggaagcttacatcttaatggagggagacggttgatgaacacataacatrtgctatcgtgccagctagagattagtgctatgaggagaaaaataaggctggacagagtggggggtgcattgcttaagcgtggagatgtgcacaaagggag

SEQ ID NO: 19819 - DNA, 201 bp, Homo sapiens
aacgtagaaaaggaagttaggttttaagaaaaagtactgaaactaaagacttcctccctgtggagcaggtcagtaaccctgtctgtcctctctagtacccraataggcttcgccccctcgtcctggatcgacgattatttcgactgggtgaagccacagtcgtcttgctgtcgagtggacaatatcactgaccagttctgc

SEQ ID NO: 19820 - DNA, 201 bp, Homo sapiens
cactgtcagtattttaaaatgttttacaaaaaatctggagacctattcttctaacagtcctccctgcatgtctccgccagtggttgaccctgcctgcgttygctgcaggcctctgactccggaaggcaaacagaggcctcaggggggagacttcatgagattcctgcccatgttcctttcggataaccctaaccccaagtg

SEQ ID NO: 19821 - DNA, 201 bp, Homo sapiens
ccacttggcagtggtgacaggatgaacacgcagtgttcgggagtgagagcgagctttaatgaggcctcccctctcccctccagtgtgttttatgtcttctrcgaacagtacctgaccatcattgacgacactatcttcaacctcggtgtgtccctgggcgcgatatttctggtgaccatggtcctcctgggctgtgagctc

SEQ ID NO: 19822 - DNA, 201 bp, Homo sapiens
tctgcagtcatcatgtgtgccaccatcgccatggtcttggtcaacatgtttggagttatgtggctctggggcatcagtctgaacgctgtatccttggtcarcctggtgatggtgagtcctcatacagtctcagtttgtccctagctcctgtttcacttgggggaattggctgtcttagattccatgtaaaccctaaagatg

SEQ ID NO: 19823 - DNA, 201 bp, Homo sapiens
ccagattcctcctttaaccagcctccatgctcaccttcccatgcctttccaactgagcccagcagaccctcagtgatcttttcactcctggaacgtttttytctctttattccccactgtcttctcagtgaccccatctgcttctgtcccacaggatgggattctttttgggatggtgggggcctatgactggggaggctc

SEQ ID NO: 19824 - DNA, 201 bp, Homo sapiens
gccaagaggcagtctgtctgactgcagccctttgcttccaagtgacctcccgtactcctggtcgctgggatcaccaattctgtgagtgactaaaatgcatyacaggcaactctcaattccttgcatgccttcctcactagacccctttccaccctcactcttgcctccttcattcagacatgaggttcaccgcatcactgg

SEQ ID NO: 19825 - DNA, 201 bp, Homo sapiens
ctgcactccagcgtgggccacagagtgaaactccatctcaaaaaaaaaaaaagatcaatgacatgaatctattatcttacttctgtcagagggttcggggkagggtgacatgtgcattcagcccctccttctttgttttgaccatggggaagcaaacactgggcttgcacttctcagagggcttacctcctactgctagaa

SEQ ID NO: 19826 - DNA, 201 bp, Homo sapiens
ggtgggggcctatgactggggaggctctgtgctatggcttgaaggaggccaccgccttttccccccacgaatggcactggaagacgagttcccccctgcaytgcagaaccatgcagcctacctgggtgagcagcagagagttgcagaggacttacagggtaggggaggaaatacatccctagtgggggcgggtatgaaata

SEQ ID NO: 19827 - DNA, 201 bp, Homo sapiens
acagcgagaccctgtctcaaaacaaaaaaaacaaggccaggcatagtggctcacgcctgtaatcccagcactttgggaggccaaggcaggtggatcacttraggtcaggaatttgagaccagtccggccaacatggcaaaaccctgtctctactaaaaatacaaaacttagcgggcgtgatggcacatacctgtaatccca

SEQ ID NO: 19828 - DNA, 201 bp, Homo sapiens
tcttttccacactgttcccagctcccggcccattgtccatctgaccccatcactggaggtgaccccacaggccatcagtgtggttcagagggactgtaggyggcgaggccaagaggcagtctgtctgactgcagccctttgcttccaagtgacctcccgtactcctggtcgctgggatcaccaattctgtgagtgactaaa

SEQ ID NO: 19829 - DNA, 201 bp, Homo sapiens
aaaatgcattacaggcaactctcaattccttgcatgccttcctcactagacccctttccaccctcactcttgcctccttcattcagacatgaggttcaccrcatcactggatgaatggactgctggggcacgtgcagcatttgatggctctggccagaggttgtcccctcggaggctccggctcagtgtggggaatgtcac

SEQ ID NO: 19830 - DNA, 201 bp, Homo sapiens
tctccatcaggcagcaggatcctagtgttccactgccgccattcctgcctcagtttctttcctttaagtagcaggaggttatttattctatttgggggctrgctttgatataatgtggggtgaggctagctgggttataggatgcatgtagaaaactactcttctgtccacgcagagcctcttggaggtggttcagacccg

SEQ ID NO: 19831 - DNA, 201 bp, Homo sapiens
ttcacttttgcctcttactagctatttgaccatgagcaagttatttcatctctctaagcctctttttcctaatctctaaaatgggaagataataccaattycatggggttgttataaagaataaatgaataatgagctggacatatggtgaacactcagtggaagctagttattatccttgtattttcctccactgaccat

SEQ ID NO: 19832 - DNA, 201 bp, Homo sapiens
gggcaggagaatcgcttgaacctgggaggcggaggttgcagtgagccaagatcacaccattgcactccagcctgggcaacaagagtgaaactccatctcaraaataaataaataaataaaaagaaagagcaaggcaggaggcctgagaaactaggtgtatgggtccctgcctcagtattctctctcttcctctcagaggat

SEQ ID NO: 19833 - DNA, 201 bp, Homo sapiens
tgaggcaggcagatcacctgaggtcaggagttcgagaccagcctggccaacatgatgaaactctactaaaaatacaaaaaattagccgggcctggtggcgyacacctataatcccagttactcaggaggctagggcaggagaatcgcttgaacctgggaggcggaggttgcagtgagccaagatcacaccattgcactcca

SEQ ID NO: 19834 - DNA, 201 bp, Homo sapiens
tgccaccttgggcagctggcaaaggggactgaggtctctgttggactattgaggctggttcacaatgaatttttccgaagagtaagcctttccttttctastactccccacttctgctcctttctggaactttagcataggttttggaggtagacagacccacgttcaagtttcacttttgcctcttactagctatttgac

SEQ ID NO: 19835 - DNA, 201 bp, Homo sapiens
tctaactgccttcttttttctcacagaggtggcttatggcagatttttcctccttcaaactccaaacataatttttaagactatgtgccagtggactcttyccttatatctctgcaccacaagttgttggatgtttcctcttcctcccttatgtctacctcaccaacctcgctcatcatttggcccttatccttccttgta

SEQ ID NO: 19836 - DNA, 201 bp, Homo sapiens
tgtctacctcaccaacctcgctcatcatttggcccttatccttccttgtacacctaccttcagatttctgcttacactttgatttcagagctttattcccyagtctgttcttactcctttgtcgcttatccagaatgatgctatgtgtagcatcttgctgtaaatcctgtacaatgattctgtgtaaatagctgtggccta

SEQ ID NO: 19837 - DNA, 201 bp, Homo sapiens; identical to SEQ ID NO: 5150

SEQ ID NO: 19838 - DNA, 201 bp, Homo sapiens
tttggcagtgacgcttatcttttcttctacagcttggcttctttgcccataagaaaatccctgaggaagaaaaaagagaagagaagttggagcaatgaatrtagaataagggtctagaaagtcctccctggcagcttcttcaagagacttgcataaaagcagaggtttgggggctcagatgggacaagaagccgcctctgg

SEQ ID NO: 19839 - DNA, 201 bp, Homo sapiens
tgatattacatgcaggatttgtactggggagtggtgggaagtaagattgtataggtgagagggatctagattacgaaaggcctctgaagccagggagaaaytgaacttaatatgacaggtagtgaggagtcagtgtgagttcctcctgggcagggaaatggcatcttaattgtaatggctgtttggcactaaggtcaatgt

SEQ ID NO: 19840 - DNA, 201 bp, Homo sapiens
ctaatctctaaaatgggaagataataccaatttcatggggttgttataaagaataaatgaataatgagctggacatatggtgaacactcagtggaagctasttattatccttgtattttcctccactgaccattacttttttttttcctgaccattccttagtgctgtatcaatcaacatttgcaggatacctaaatttaa

SEQ ID NO: 19841 - DNA, 201 bp, Homo sapiens
ggtcttcgtgaagctgactgccagcaggtgagaatgaagggaactttcttccagacctctcctcctactgagtcttgactggaggggtggggaggaacaayattgattcctctattaacagagaagggtgtcttctgaggaggggttgagatgtgagcctctcccctctgaccctacagtgacagcctggagagaaatggg

SEQ ID NO: 19842 - DNA, 201 bp, Homo sapiens
gaggaagaagattggggtattggcctcagctgtgaggtcctctagagaaaggctcagtgtttagaggctgtgggtaggacagcagttgcagccccagctcsagcttctatctccattcccctgccctcagagagagagcccaataaaggtggaatgtgccgccccttctgctcatgcccggctctgcagtgtggggcatcc

SEQ ID NO: 19843 - DNA, 201 bp, Homo sapiens
ctctctggggggctttctttttacacatgtggcttattagagagaagaaaaaggtattataaggggaagaactacaagggtgtaggtatgttccaactcarccttgagtggctagcgccaccccatcaggagggtctttcaagttggatcttcctctaggcaagctgcatagtgcagaacctgactgaacccccaggccca

SEQ ID NO: 19844 - DNA, 201 bp, Homo sapiens
tgcctccttcattcagacatgaggttcaccgcatcactggatgaatggactgctggggcacgtgcagcatttgatggctctggccagaggttgtcccctcrgaggctccggctcagtgtggggaatgtcacttgtgagcagctacacttccatgtgctggtaaggagagggcagtaactgcttagcatcagggcctgagaa

SEQ ID NO: 19845 - DNA, 201 bp, Homo sapiens
ggaagatgggcaccagggagcactgtacctgtaccatggaacccagagtggagtcaggccccatcctgcccaggtcaggagtacccaaataaagcaggggyacggttgtaggaagaggaatagggggatgctctttgcttgtcaatagtctccttggcttgagacccaaactgaacaagtgcttttattagtaggcaaaaa

SEQ ID NO: 19846 - DNA, 201 bp, Homo sapiens
aaaaagcaggcaggcagactgagattaagacgcttcctcacagcttctctcgggctgtgcctctagccattcactacctcatactaacattatgatcctgrccccacaggtctctgctccccctttaacctggatgaacatcacccacgcctattcccagggccaccagaagctgaatttggatacagtgtcttacaacat

SEQ ID NO: 19847 - DNA, 201 bp, Homo sapiens
gaagatgggcaccagggagcactgtacctgtaccatggaacccagagtggagtcaggccccatcctgcccaggtcaggagtacccaaataaagcaggggcrcggttgtaggaagaggaatagggggatgctctttgcttgtcaatagtctccttggcttgagacccaaactgaacaagtgcttttattagtaggcaaaaac

SEQ ID NO: 19848 - DNA, 201 bp, Homo sapiens
gttgcagaggacttacagggtaggggaggaaatacatccctagtgggggcgggtatgaaatactccctcttaactcatgcggtttctcactgacctctggytacttcccttgggacctcctgctatgcctttagggaacccccctactctggaccccatcttcttttcctttacctctgttactttgcccacttctaggtt

SEQ ID NO: 19849 - DNA, 201 bp, Homo sapiens
cctgatattgtctcaatgttttctcatgaccaagggtcccatgcagaaaacgaaagctcctttgggctggaaatgtctcagattggtttctccactcatcrgctaaaggttggacagattgaccccttcattacttctcccattctctgactcagataacttcaaccacagggccctccagattcctcctttaaccagcct

SEQ ID NO: 19850 - DNA, 201 bp, Homo sapiens
actttgctgttgggattccaaagaactatatcacctgataatggctcattttaaatgtcttcctatccacttgttccataggccaagttcaagtccctgayggtggtcagcacctttgagctgggaaccgaagagggcagtgtcctacagctgactgaagcctcccgttggagtgaggtagggctggagaccgagtctgag

SEQ ID NO: 19851 - DNA, 201 bp, Homo sapiens
aggtccccttctcaaaggattgtggccctgacaatgaatgtgtcacagacctggtgcttcaagtgaatatggacatcagaggctccaggttggatggacaygtactaggcaaaccagggtgacctgagacagactggaagggactcgaagggcgggtagggggttgtttcttacccatgataacaaaagtgagacttttgg

SEQ ID NO: 19852 - DNA, 201 bp, Homo sapiens
gccatcagtgtggttcagagggactgtaggcggcgaggccaagaggcagtctgtctgactgcagccctttgcttccaagtgacctcccgtactcctggtcrctgggatcaccaattctgtgagtgactaaaatgcattacaggcaactctcaattccttgcatgccttcctcactagacccctttccaccctcactcttgc

SEQ ID NO: 19853 - DNA, 201 bp, Homo sapiens
tatcacctgataatggctcattttaaatgtcttcctatccacttgttccataggccaagttcaagtccctgacggtggtcagcacctttgagctgggaacygaagagggcagtgtcctacagctgactgaagcctcccgttggagtgaggtagggctggagaccgagtctgagagctgtgaaaataatgatgatgggtatg

SEQ ID NO: 19854 - DNA, 201 bp, Homo sapiens
ttccctccccttccatgtgcctcagtttttccaaaaacccaagcccttgcggctgctcagtctttttgccctcaatcctattcatgctgaatcttcccttwtaagcatcttactttcctaggtatagtgttttgccaggccttgggcactggagctgggatgaggggatatgggatgtagccataaagcttgcattgtctg

SEQ ID NO: 19855 - DNA, 201 bp, Homo sapiens
gaagagtaagcctttccttttctagtactccccacttctgctcctttctggaactttagcataggttttggaggtagacagacccacgttcaagtttcacwtttgcctcttactagctatttgaccatgagcaagttatttcatctctctaagcctctttttcctaatctctaaaatgggaagataataccaatttcatgg

SEQ ID NO: 19856 - DNA, 201 bp, Homo sapiens
ttgggcagctggcaaaggggactgaggtctctgttggactattgaggctggttcacaatgaatttttccgaagagtaagcctttccttttctagtactccscacttctgctcctttctggaactttagcataggttttggaggtagacagacccacgttcaagtttcacttttgcctcttactagctatttgaccatgagc

SEQ ID NO: 19857 - DNA, 201 bp, Homo sapiens
gtctgtgtcatgttctacttctgtcttctccatgtacccccacctctttatccatgtgctggccctgcctcctctgaatccacgtctgtgtgctgatcatrtgcccctgtgtctgtgttatggctgtgaccatgtacttcctgacttggtgttcacacagtgagtctaccctgcaccgctatgaggttcacccatatggga

SEQ ID NO: 19858 - DNA, 201 bp, Homo sapiens
cctcttaggtccttggtcactacctccggcggcagcgagatcccagctctttcctgagagaaattagaactattgccagtgatccagatgagcgattcttyttcaatgtcacagatgaggctgctctgactgacattgtggatgcactaggagatcggatttttggccttgaaggtgaggattactctggagaaatggaca

SEQ ID NO: 19859 - DNA, 201 bp, Homo sapiens
gctcagtgccgcctgtcctccgggagctgtggcctccctgggccccggggctaggctgaggtaagcgcacagcggaggccaggggccccggcagaggccckggggatagggtggaggcatctctgggtgtgggtgtgggtgtgggtgtgggagggagagttcttgcctctctctctcccatctccaactcttgcttcagtg

SEQ ID NO: 19860 - DNA, 201 bp, Homo sapiens
cgggaggtttttgatccctttttttcagaatggattatttgctcatgattttctctctgctgtttgtggcttgccaaggagctccagaaacaggtaggcaygctcgttgacttgtaagtctcggaattacaagttagtgtgttcttatccaccttcatgcttttcttgcttctatttttccccgttctttttatgactgca

SEQ ID NO: 19861 - DNA, 201 bp, Homo sapiens
aaggttgggatggggctacggaagaaaccagaacaactctagtttatttaaaacctgtatttactgcccacttccccttagacttgaccatatgacccctygctcccattctaagcataggggcaggctttatttttacaatggtaatagatatcacttgaggttttatcaaagagttgcggcgggtggtgaaagttcaca

SEQ ID NO: 19862 - DNA, 201 bp, Homo sapiens
cagcttgaagccaaggaattgtatccagtcgttcaagcaatgtatgttcagtaaaatcacctgcagagcaaaagtctgttgactaactaccgcctcccccscccccgccaccaccccccgcaggcggtttctgggtgaagcagatgttttctttaaaatttgtcatcattgactttaggtttcttttggcaggtttttggc

SEQ ID NO: 19863 - DNA, 201 bp, Homo sapiens
gagagccctctggctatgagtccttccacaaccatatggtaccaccgactggcaggagaaatgtgtgaacatgtgcctcctcctcccccaaccactggggycggtggggtgacggtggcacttttagcagtatcctccgtggtttgagttgaaaataagttttaaaaatcctgtgagtcatggttttgcattgaaacctct

SEQ ID NO: 19864 - DNA, 201 bp, Homo sapiens; identical to SEQ ID NO: 5157

SEQ ID NO: 19865 - DNA, 201 bp, Homo sapiens
gtgttcttatccaccttcatgcttttcttgcttctatttttccccgttctttttatgactgcagcttagagagcaagtgtctgagaattattgctgaaagstactttaagtcttctagtgtaaaatgtaaaattcctctactgaatacaattaggtgcaattgactataacatgacattaaaataacttatcgttttatta

SEQ ID NO: 19866 - DNA, 201 bp, Homo sapiens
gtggagactgagaggcagaagtgatgatatagagggttagaatcacttaattttacttacagaaaaacctaggctcaaagtgttgaagccatttgtgcagragtgagtttgtagcagagctagaactggagcccggatttcctttgctgctatattttccctttagaaatgcccatttcagaactgaaatagaaatactgt

SEQ ID NO: 19867 - DNA, 201 bp, Homo sapiens
tgcttcttttctttttctctcttttcaactaagtcaccgtcaatttattaagatggccataactattcaaaacctatgctgagttcctcaaggcagggtcrcatagtgatgaaggttgggatggggctacggaagaaaccagaacaactctagtttatttaaaacctgtatttactgcccacttccccttagacttgacca

SEQ ID NO: 19868 - DNA, 201 bp, Homo sapiens
agcagaggagatctatgcatcctatagattaaaaggagcaaaagaatccctcttaaatatttccatgaagctctggaatgcaaaccgatgtcctctgtacytttagcacataccatttcatctacaggtagatttcccaaccaaaatatatccagagatgcctttgtcattgggttatatacagcctttgcctctctgagt

SEQ ID NO: 19869 - DNA, 201 bp, Homo sapiens
tgtgttcttatccaccttcatgcttttcttgcttctatttttccccgttctttttatgactgcagcttagagagcaagtgtctgagaattattgctgaaasctactttaagtcttctagtgtaaaatgtaaaattcctctactgaatacaattaggtgcaattgactataacatgacattaaaataacttatcgttttatt

SEQ ID NO: 19870 - DNA, 201 bp, Homo sapiens
gcggactccagcactgcacgggcaggtttagcaaaggtctctaatgggtattttctttttcttagccctgcccccgaattgtcagacggcgggcgtctgcytctgaagttagcagtgatttcctttcgggcctggccttatctccggctgcacgttgcctgttggtgactaataacacaataacattgtctggggctggaa

SEQ ID NO: 19871 - DNA, 201 bp, Homo sapiens
cccttttttctgtgtttcttgctgatggcaggctgtgtgcttcatctgcttttatctgctctgctagctctgactctactgtgatccagcatgtctctcgrcgtttgaggagacatcccccactgacctgctctttctctccccagcagtcttaggcgctgagctcagcgcggtgggtgagaacggcggggagaaacccac

SEQ ID NO: 19872 - DNA, 201 bp, Homo sapiens
cactttgcctatgataaaatacttcctcattctttgtgtgattttcaagcaacttaacgactgttagctttgctgagctaaatgcaacatctcataccaartttattggcttggcaaagttacaaattttattacgcaaaagttgagaaaggaaagctggagaatgctaaaaacagtacaatttgctactgtgtagtatct

SEQ ID NO: 19873 - DNA, 201 bp, Homo sapiens
agtgtaaaatgtaaaattcctctactgaatacaattaggtgcaattgactataacatgacattaaaataacttatcgttttattattattattccattatrtgtttccttggcttttaaaaaatgagaagagtatggacatatacaatttagtcaaatgtatgtttgtaatatatgtgtttatacaggtacacaggccata

SEQ ID NO: 19874 - DNA, 201 bp, Homo sapiens
tctctttggataataggcacgttgttccgtatggacttggaagccctaggtccaagagagccttggagaatttacttcccacaaaggcaacagaccgtgaraatagatgccaatgtgctagccaaaaagacaagaagtgctggaatttttgccaagcaggaaaagaactcaggtgagcagaaacacctttgcttttcaatc

SEQ ID NO: 19875 - DNA, 201 bp, Homo sapiens
cgaggtcagatgtgggttagtgcaacctgtgcttctcatgggagggtggagactgagaggcagaagtgatgatatagagggttagaatcacttaattttasttacagaaaaacctaggctcaaagtgttgaagccatttgtgcaggagtgagtttgtagcagagctagaactggagcccggatttcctttgctgctatatt

SEQ ID NO: 19876 - DNA, 201 bp, Homo sapiens
tttaaaataacatttgttttctcttatcttgctttattaggtcggagaccatgagaaacagcgtcaaatcatcttttcatgatcccaagctgaaaggcaakccctccagagagcgttatgtgacccacaaccgagcacattggtgacagaccttcggggcctgtctgaagccatagcctccacggagagccctgtggccga

SEQ ID NO: 19877 - DNA, 201 bp, Homo sapiens
tacggaagaaaccagaacaactctagtttatttaaaacctgtatttactgcccacttccccttagacttgaccatatgacccctcgctcccattctaagcrtaggggcaggctttatttttacaatggtaatagatatcacttgaggttttatcaaagagttgcggcgggtggtgaaagttcacaaccagattcaggtttt

SEQ ID NO: 19878 - DNA, 201 bp, Homo sapiens
catgttaaggagggaaaaaaataaagagcccttttttctgtgtttcttgctgatggcaggctgtgtgcttcatctgcttttatctgctctgctagctctgmctctactgtgatccagcatgtctctcggcgtttgaggagacatcccccactgacctgctctttctctccccagcagtcttaggcgctgagctcagcgcgg

SEQ ID NO: 19879 - DNA, 201 bp, Homo sapiens
cattccagcttgaagccaaggaattgtatccagtcgttcaagcaatgtatgttcagtaaaatcacctgcagagcaaaagtctgttgactaactaccgcctcccccccccccgccaccaccccccgcaggcggtttctgggtgaagcagatgttttctttaaaatttgtcatcattgactttaggtttcttttggcaggttt

SEQ ID NO: 19880 - DNA, 201 bp, Homo sapiens
tccccgttctttttatgactgcagcttagagagcaagtgtctgagaattattgctgaaagctactttaagtcttctagtgtaaaatgtaaaattcctctaytgaatacaattaggtgcaattgactataacatgacattaaaataacttatcgttttattattattattccattatgtgtttccttggcttttaaaaaatg

SEQ ID NO: 19881 - DNA, 201 bp, Homo sapiens
ccagcttgaagccaaggaattgtatccagtcgttcaagcaatgtatgttcagtaaaatcacctgcagagcaaaagtctgttgactaactaccgcctccccsccccccgccaccaccccccgcaggcggtttctgggtgaagcagatgttttctttaaaatttgtcatcattgactttaggtttcttttggcaggtttttgg

SEQ ID NO: 19882 - DNA, 201 bp, Homo sapiens
agctctcctctcctctcccaaggtcggctttggagagggaggtcagggcacccttgcctggcacaggcggcagcgctggcttccggctcagtgccgcctgycctccgggagctgtggcctccctgggccccggggctaggctgaggtaagcgcacagcggaggccaggggccccggcagaggccctggggatagggtggag

SEQ ID NO: 19883 - DNA, 201 bp, Homo sapiens
gcccagggattcggaattcaaaatccccccagcctaccttcagtcccctgacctgcttctcagccccaccttaggtcactggtttctatggagttaccctmctgaattgaatattgaatagttaatttctctctccaatcattttccccacctaattttgaaagatatacatcatctggggtaccctgtgccctacacagc

SEQ ID NO: 19884 - DNA, 201 bp, Homo sapiens
actttaccctctgaaatgatgctcccaagtgctatgtgatgagctccttgtgtgcccagtggaataggtgtgtccatgtgtcattttaaagactattaatyacactaatatagtttctttctctctttggataataggcacgttgttccgtatggacttggaagccctaggtccaagagagccttggagaatttacttccc

SEQ ID NO: 19885 - DNA, 201 bp, Homo sapiens
tgctcgtccctgatggataaagagtgtgtctacttctgccacctggacatcatttgggtcaacactcccgagtaagtctctagagggcattgtaaccctaktcattcattagcgctggctccactggagcccagttttagagtttcttttctagggactctgaaggtagtccttctaacaccatccaagtgcctcagtggg

SEQ ID NO: 19886 - DNA, 201 bp, Homo sapiens
gctatgagtccttccacaaccatatggtaccaccgactggcaggagaaatgtgtgaacatgtgcctcctcctcccccaaccactggggtcggtggggtgayggtggcacttttagcagtatcctccgtggtttgagttgaaaataagttttaaaaatcctgtgagtcatggttttgcattgaaacctcttcccactgtgta

SEQ ID NO: 19887 - DNA, 201 bp, Homo sapiens; identical to SEQ ID NO: 5159

SEQ ID NO: 19888 - DNA, 201 bp, Homo sapiens
gctctcctctcctctcccaaggtcggctttggagagggaggtcagggcacccttgcctggcacaggcggcagcgctggcttccggctcagtgccgcctgtyctccgggagctgtggcctccctgggccccggggctaggctgaggtaagcgcacagcggaggccaggggccccggcagaggccctggggatagggtggagg

SEQ ID NO: 19889 - DNA, 201 bp, Homo sapiens
aaacctactctctgatctaccacatgttctgcatttttctatcatggtctatggaaacttctcttagaaatccagtggcaagaagttctatgattaaagtrttctgagctcaggccaggcagtcatgaactacttctgagttgtttactactgatttgtggggcagcctcagctatcggtttcttcacacctgcttatgag

SEQ ID NO: 19890 - DNA, 201 bp, Homo sapiens
catggtctatggaaacttctcttagaaatccagtggcaagaagttctatgattaaagtgttctgagctcaggccaggcagtcatgaactacttctgagttrtttactactgatttgtggggcagcctcagctatcggtttcttcacacctgcttatgagagtatccatatttatggtcgcaggccagtaatgctccccacg

SEQ ID NO: 19891 - DNA, 201 bp, Homo sapiens
gcaaaaaaaaaaaatctttttaaaaataattgccataaagtatttgctctgggcctactgtatgcttcttttctttttctctcttttcaactaagtcaccrtcaatttattaagatggccataactattcaaaacctatgctgagttcctcaaggcagggtcgcatagtgatgaaggttgggatggggctacggaagaaac

SEQ ID NO: 19892 - DNA, 201 bp, Homo sapiens
gtggcaagaagttctatgattaaagtgttctgagctcaggccaggcagtcatgaactacttctgagttgtttactactgatttgtggggcagcctcagctrtcggtttcttcacacctgcttatgagagtatccatatttatggtcgcaggccagtaatgctccccacgagatcagtttctgaactaacctggaatttttt

SEQ ID NO: 19893 - DNA, 201 bp, Homo sapiens
atttcccaaccaaaatatatccagagatgcctttgtcattgggttatatacagcctttgcctctctgagtcaatgtatttaccactttccctgagaaatcraaaatcattttggggagcggacatttagaaaaagaatcaaagtgtcatggataatcaaattcttcaataagttgcagttattcagatggccaaaggaaaa

SEQ ID NO: 19894 - DNA, 201 bp, Homo sapiens
aaattgtgccaatatttcttacataaacgtttaaaaataatattttatttttattcacagatatatttcttagcctcctctcacccccaagtatttaattmtagaatatattttccttttctggttgtttctatgaagagattgattccccataataaaacccttcataatagaatatgatgctctaaagagtcaatctgt

SEQ ID NO: 19895 - DNA, 201 bp, Homo sapiens
  misc_feature (1)...(201): n = A,T,C or G, or insertion/deletion polymorphism (see Tables 1-2)
aaagagttctactcatatcaaaatgaggcagtggccatagaaaatatcaagagaggcctggctagcctatttcagacacagttaagctctggaaccaccantgaggtacttaccaatattaataaggattcagcatctcaataaaatttgtaaggatttctacttatacaatttcagtagaagagttactactaaggtaat

SEQ ID NO: 19896 - DNA, 201 bp, Homo sapiens
atttttgcttcatttgtgttctgttcccctctccccaccaggtcaaagagttctactcatatcaaaatgaggcagtggccatagaaaatatcaagagaggyctggctagcctatttcagacacagttaagctctggaaccaccaatgaggtacttaccaatattaataaggattcagcatctcaataaaatttgtaaggat

SEQ ID NO: 19897 - DNA, 201 bp, Homo sapiens
aagacaaaattgtgcccatcttggagctcatattccaagcacttggccctcttggtattggtcccctttctcctttactatagatatgttataatttcatwtattagatgattaataagtgcctttaattggaggcaaagagaaaatgttgatgttaacagaaacaagaaagtttaggacacaacagaatagagctaccac

SEQ ID NO: 19898 - DNA, 201 bp, Homo sapiens
gtccaagaacttttttatttgctattattttaaaccttagttattttttgtttcaagtacagttacaggtagagaacatgctgacatgttcaaacagaatkttcatcatttctcttccctgggccatccttgttttcatgaggctcccagcctatatcagtgctctctcccaatgctgtgcccatcatgcaagagccttca

SEQ ID NO: 19899 - DNA, 201 bp, Homo sapiens
ctttactatagatatgttataatttcatatattagatgattaataagtgcctttaattggaggcaaagagaaaatgttgatgttaacagaaacaagaaagkttaggacacaacagaatagagctaccactgtctcctcacttggctctctcaggcacgagggcttaggtgatatttatcctgaaggcaggagctgaactat

SEQ ID NO: 19900 - DNA, 201 bp, Homo sapiens
gaatgtataagttaatggtggcttctgtcatattttgcccatgatttccttatctgtaagaggctgtatggtttatagtcactcagagaaagtttcgaatwtgaacttgaaacctaagtaatttgatccattgaacttgacaaatgtccatttgtcttttcaaaggtgcacatattcacaaaactgaaattgtgccaatat

SEQ ID NO: 19901 - DNA, 201 bp, Homo sapiens
aatgagtatggctgtgttccaataaaattttatgtacaagaatagccagtgggccagacttgcctgctggccatagtttgccaatccctgatctagattawcttgtacagtttttctattcactaagctagggcagctaaggcaaggcatattctatgagaaagattgccccctagctattaaacatagcccagtgtctgt

SEQ ID NO: 19902 - DNA, 201 bp, Homo sapiens
tttctggttttggctttgtgttgattaaattaaccacgtggctgctgagtcagacctttattttgtattgtttccgggcattgatttgctctctaaatcascatggctcttgtacacacactgaactgccacaagaaatgtgacaccttgaaagtccttctgaaatttgttgtatatttctttacttgtttgttctccagt

SEQ ID NO: 19903 - DNA, 201 bp, Homo sapiens
gttctggcattctaaggagaagtaacctgaacatctttcagtacattgggaaggctggtcttcacggtagccaggtaactcacttctcatggattttgctyaataaagtatgcaagaaatcaggctgaggtaaaataaaacatatatgctgtgggtaatgctatagaatgtataagttaatggtggcttctgtcatatttt

SEQ ID NO: 19904 - DNA, 201 bp, Homo sapiens
tggatgaacaagattataattttcaaattaggaagagagaaaaagatgcaaagaaaggaatatttctgaggtgaggcacaccatagctttcatttggaaayaatcatgtttggagtacacatacagaactctcatattttggtcccatagttcacaggcataggtgaaaatgtgggcatgactattgtgttttcttcagga

SEQ ID NO: 19905 - DNA, 201 bp, Homo sapiens
gaagagagagtaaacctagtctgtgttcttcctgaggaaggaaccaagtactcccctgaataacagtgtttggtcagttaaaatggtttagatttatgtgytgagaagggaggccaaattagttggtctctggggacttttccaattgtaatatatggtgattcccttatttgcttctcaagaacctaaagataatagatt

SEQ ID NO: 19906 - DNA, 201 bp, Homo sapiens
aaaattaactgggcttagtggcgtgagtgtgtggtcccaactactcagaaggctgaggtgggaggatcacttgagcctggagatgaaggttgcagtgagcygagatcgcatgactgcactccagcctgggtgacagagtgagaccctgtctcaaaaaaaaaaaaaaaaaaaaagtaaagaaagaagaagaaactttctctg

SEQ ID NO: 19907 - DNA, 201 bp, Homo sapiens
tttctttgaaggttcgacagattatgtgacttcactacccaaaattctatggcagcgtcccatctcactcaaactccccaaatcttcctgccacccatagrtacctcctttaccttgtctccttcactgtgtcttttacttatttatttccagcctctttggtctccctgctcttcctccattacacctgcaggagccctc

SEQ ID NO: 19908 - DNA, 201 bp, Homo sapiens
taagtcacatctagaattcagggaggatagagggcttaatgaagttagggggaagcatatggtgtcaagaatgtggacaacggctgaaccttgaaagttcwgtcacataatagttatttgtccacaggtgacatactttactggcctcagtgttctgattattgctgcaaggactgaaaaaggataccaggatctttgcct

SEQ ID NO: 19909 - DNA, 201 bp, Homo sapiens
ccaatattaataaggattcagcatctcaataaaatttgtaaggatttctacttatacaatttcagtagaagagttactactaaggtaatgctcagaaaagrtgacttgtgtagtgaagtcgcatttgcctatgaaacaattgccatttatcccaatgttttgttaattaattacaaggtagagaggattagaaatatttat

SEQ ID NO: 19910 - DNA, 201 bp, Homo sapiens
ccagctggcaccaccctggctcttggaaaggcatgaggaaaatttggcttcctcttttttccactgaggattttttttttccaaatttgacttgggaaacwgtcattacaatgaatgtgcagctttttttttcctcatatgttgcagcaaaattgtccgtcgagttctgaaggaaatggtcgctcacaattatgaccgttt

SEQ ID NO: 19911 - DNA, 201 bp, Homo sapiens
aaatttttgattcatcttgagctatggatgaaggaactgagagcaatcaaacagtagcacatttaatgtgaagtgtgacccacagtgttaccaaaaggaamcacagaatgaaaaatgacactggtcatcaaaaggttcacaatataacttagggcttcccacataatcagtcatctttcacctctttccaaagtactttct

SEQ ID NO: 19912 - DNA, 201 bp, Homo sapiens
aatctagatgtgcactaagtttgaacatcttatgaacaggtgaagaagaccttaaacagaatataccaccaaaaccgtaaagttcatgaaaagactgtgcrcactgctgcagctgctatcattttaaataacaatccatcctacatggacgtcaagaacatcctgctgtctattggggagcttccccaagaaatgaataaa

SEQ ID NO: 19913 - DNA, 201 bp, Homo sapiens
ctgatgaagacagatataggaagttttttttaacagctttctttctgttactccagatgaaggatgtaaatgttgaaaatgtgaatcagcagagaggagasaagagcatcttcaaaggaaaaagcccatctaaaataatgggaaaggaaaacttggaagctctgcaaagacctacgctccttcatctaatccatggaaagg

SEQ ID NO: 19914 - DNA, 201 bp, Homo sapiens
agttatgagtggggtatgagcctgcagtgtatgttttgcagctctcggagctctggcggtccaccaggaaatacctgcagcctgacaacctttccaaggcygaggctgtcagaaacttcctggccttcattcagcacctcaggactgcgaagaaagaagagatccttcaaatactaaagatggaaaataaggaagtattgt

SEQ ID NO: 19915 - DNA, 201 bp, Homo sapiens
aaattatatagtttctgtgtcccctcagtctcttcatctataaaatgagactaataatagtgcctacctcattagatttttgtgaggattaaataagttamtacatgtaacatgcagatgatggatttttgaccaccatttcctctgggcaagtacgtgctgtcatatgtagaggagacagtgaacagattgttactgtgt

SEQ ID NO: 19916 - DNA, 201 bp, Homo sapiens
taagttccccaacctttgtgtggggttgtctgtcagaaacatttctggattgttggttttttgaagtaagaaagaccccttttaaaccaactgccccaccwccaaaacaattattttcttgtactacattttcatcgaaaagttatgccacagtgcagtaatttaatggtcacttgaccagaaatacaatagcagattttc

SEQ ID NO: 19917 - DNA, 201 bp, Homo sapiens
gttcaaaggttctattggtagcagtgacatcagagaaactgttatgatcatcactgggacacttgtcagaaagttgtgtcagaatgaaggctgcaaactcwaagtaagtgcaaatccaatctcatgtattacatcattctacaccattgtccatttgatactcaccatgctgcctactattggcactcctaattctcttta

SEQ ID NO: 19918 - DNA, 201 bp, Homo sapiens
aaaattaaaataaaatggggaggggtctttttgagaaagtcttaatcattttttcatttgttcaaattaaaaaaaaaatcacttcttgagaaaactcaaaycaatagaaactctgtgaatggtagagatttttaagtattccttcccctaaacattgatatccatgattatgcctttttttatagacctcagctggtggat

SEQ ID NO: 19919 - DNA, 201 bp, Homo sapiens
gtcaagaacatcctgctgtctattggggagcttccccaagaaatgaataaatacatgctcgccattgttcaagacatcctacgttttgaaatgcctgcaakgtataatacattgcacatgtctctctgtgtattcaagcttatttgtgtgttcatggggtaccgatgtagctaataataatgatgtggtcattatgcaggg

SEQ ID NO: 19920 - DNA, 201 bp, Homo sapiens
actaaaagccaatatagaggtccagggtggtctagctattgatatttcaggtgcaatggagtttagcttgtggtatcgtgagtctaaaacccgagtgaaawataggtaagtgtttatgcattatacatttatgaattacatataagactatatacagagaacttccgaaatatgttttgggaattaatcttctgacttttc

SEQ ID NO: 19921 - DNA, 201 bp, Homo sapiens
cagagaggagagaagagcatcttcaaaggaaaaagcccatctaaaataatgggaaaggaaaacttggaagctctgcaaagacctacgctccttcatctaayccatggaaaggtaaaggggcgtttagattccacaactttttctccaacttcatatttttcttcccttcagtagatattattttgaggtaatcacattgta

SEQ ID NO: 19922 - DNA, 201 bp, Homo sapiens
ttaactggataattaccagatttccatttctggttttggctttgtgttgattaaattaaccacgtggctgctgagtcagacctttattttgtattgtttcygggcattgatttgctctctaaatcagcatggctcttgtacacacactgaactgccacaagaaatgtgacaccttgaaagtccttctgaaatttgttgtat

SEQ ID NO: 19923 - DNA, 201 bp, Homo sapiens
cagtttttttctttgaatgcccctcagtacttctgcatttataggatggtagactggtttggtttagctctcaaaagtgaaaacatttaaagtttcctcaytgggtgaaaaaaattaaaaagagtgagagactgaaaactgcagcccacctacgtttaatcattaatagtgagcccttcagtgaacttaggtcctgatttt

SEQ ID NO: 19924 - DNA, 201 bp, Homo sapiens
aagtgtttctgttgatataaaaagaaatgagaagaaaatcacccattcatggagtagcctttgacactcatatcctttctcagattgctttggaacagaarcttcaagtacattcagtaacttggctggagaggtatagggtgacttaactgtgtgtgtaattctgttattgttgctgttgttgtacaggcaatttgagaa

SEQ ID NO: 19925 - DNA, 201 bp, Homo sapiens
agtttgtgtccatcacattagttataatgcctcaaacaaccccttcatcccatgcagccatattttgtcctatatcaaatgtctctttaagtatccttagrgctatctcctaatgtgtcctgagcatggcactgagaatctcatgcttccatcaaagagtgtccttcagactgaaagtagcttcatgccgcaaccgtactt

SEQ ID NO: 19926 - DNA, 201 bp, Homo sapiens
ttcccaggcaatgctgatgctgttgttcacagaaacacactttgagaaccattgttcctttcaaagtgtagcaatgattgaaggaaaacatccttcttaaytggcacttcatcactctggtattttaattgactaattaatttagcaaatcaacagagtctacttccggtgcttaaaattaggacagcatgtttccaagcc

SEQ ID NO: 19927 - DNA, 201 bp, Homo sapiens
tgaatataggacatcagaaggtactctaagtgattcagggattaaaacgacctctgacctatttttacactgatcataacagcagcaggggttttaatttrcgcagcaaaaattaatattcctgtcaaaacataagggcataaaactctcatttaattgtgaaagcagtttctcacagtttgatttaaagtccacaattca

SEQ ID NO: 19928 - DNA, 201 bp, Homo sapiens
tactttctagacagaagtttttccaaatgaaatggaattgaattctttgcaaagagaaatcaacaacagcaacaacaacaaaaagtaatttggattttttwaaaaagtacacagtatccttaagaatctacccttatccatattgtaaccaatctgtcttccatttccacttgttcatttgaaaaaaatatcttttaaacc

SEQ ID NO: 19929 - DNA, 201 bp, Homo sapiens
agataagacaacatgtatttcctttatgccctatgtggaatttgataggtgtcataaaaagaaggcctcctgaccgaaatatttttcctgaccagaaagcyagtatttgaacccgctatagagtccccaattacaatgcagaagacatagagataagagggaatcccagtcttcatccccttcaaggtttttcctgactct

SEQ ID NO: 19930 - DNA, 201 bp, Homo sapiens
aatataggacatcagaaggtactctaagtgattcagggattaaaacgacctctgacctatttttacactgatcataacagcagcaggggttttaatttgcrcagcaaaaattaatattcctgtcaaaacataagggcataaaactctcatttaattgtgaaagcagtttctcacagtttgatttaaagtccacaattcaat

SEQ ID NO: 19931 - DNA, 201 bp, Homo sapiens
aattctaaatgcacttgaagggcaaatgaaagagattctgacttttttggctaatattactttctgttttggttttatctaacaacagttatcaaaaaatrttactatacatactctgaagagcactatcctacaaaaggaattaagtcaacaatataaatgggacatgccccaatgcccagtgttgccagatctctgcaa

SEQ ID NO: 19932 - DNA, 201 bp, Homo sapiens
agaatatataaggagattgaaataaaaatttacagatgattggattgacttgtaaagtttactttattgttttaatacattaatggataatagcctacgtktgaattttgcctccgttaccttcttgctatgtgctcttgggcagttacttaatagccttaagccacaatttcatactagtaaaatgaggcacctggaaca

SEQ ID NO: 19933 - DNA, 201 bp, Homo sapiens
aaaaaaacaccaaacaataaaatatagcaaaacgacagtatatattcatacaatttttaaaatacagcataacagcaacatagcatttacactgtattagrtattataagtaatctagagatgatttaaagtgtatgggaggatgggtgtaggttacatgcaaatactatgcctttttatataagggacttgagcaccctt

SEQ ID NO: 19934 - DNA, 201 bp, Homo sapiens
ttgaaattatttatcctcttcatcattatccagggcacattccccagccaatgcaatctgtttatccagttatctagagcatcattaaaggacccaccatwtttttcctcctaggacctactgtacatgccccactgtaagaatgattttttgtaacacaatattttttcaaatatcttggcaatcaagggcttacgcctc

SEQ ID NO: 19935 - DNA, 201 bp, Homo sapiens
tttttcaatgggtgtctgaacaaaattgtttctgtcaatacaaatgtagaaaggacaaagagcagtgcgtcttgtatcccttaatcctcaagtcacacatkaaaaaaacagttctcaaattatatcagaattttacattgcacaattccagttttaatgaaagaatcgtctaaaggcagcataagtactgaaaaagtagtc

SEQ ID NO: 19936 - DNA, 201 bp, Homo sapiens
agatttggagtgtcagatctctttctcccaggattaatacaggtaagaatctgaccttgcctgacacttatttaaatctgataaatgatgcatttttgctycatttgtgttctgttcccctctccccaccaggtcaaagagttctactcatatcaaaatgaggcagtggccatagaaaatatcaagagaggcctggctagc

SEQ ID NO: 19937 - DNA, 201 bp, Homo sapiens
tctaagcacatccaggtcacctctgaatcccttaagtgtttccttccagtcactggcatcatacgttcagaccctgtaaagttacagctgttagtccaatwccattaaatataatatgaacaagttttttctttttttctcaaatgtttagggtgactgtggtaataaccactgacatcacagtggactcctcttttgtga

SEQ ID NO: 19938 - DNA, 201 bp, Homo sapiens
agagtccacttctcagtgactcctagctgggcactggatgcagttgaggattgctggtcaatatgattcttcttgctgtgctttttctctgcttcatttcstcatattcagcttctgttaaaggtaagtttgtgttgccttttgctaaactttaatttccatctttggagttggaggcagatacgtgcgtgtgtgtgtgtt

SEQ ID NO: 19939 - DNA, 201 bp, Homo sapiens
cattcaggtaagatgcagcgttcaggtcatgttccaggaccatccccagtgcaccaggaacttgcattcagtttagaacattcagtttcagaattaaaacraaacagtagaaacccagggaaagatgaattttctttaaatgagtagaagaataattgataaggccaaaaaaagtcagtttctgggataccaaaaaaaaat

SEQ ID NO: 19940 - DNA, 201 bp, Homo sapiens
tatcagctcaggatagctgtatataacaaaaacaaaaagcaatttagagtggcttaactaaatagtttcacttttatagtgtaacaaacatttggaagtasgtggtccagggttaatatggaaatcttaagatatcatcagaatccaagctgccttccttcagctcagccattcttacttgtgacttttgacctcatgctt

SEQ ID NO: 19941 - DNA, 201 bp, Homo sapiens
atggagcaagtgagtgagaaaagaagccaaatctctctgcagccatgtatttctagttgaacgcatttagcttctccatttctttgtttgcttttatgagrccctgtgaaggagatcctgggtgtacttgctgccttcgtcttatggctctagcatttcagggacccggaaagaggagacagtggggtagagaacagacta

SEQ ID NO: 19942 - DNA, 201 bp, Homo sapiens
gactttctatatctagtagggtaatacatttccttccaacctttagtggggtgaagttcatttgtcttctaatctaagaaaatacgttaactcctgacaayctctgacactcaacagaaacacaactgtactttggaattaatcatccatctttatttcatagtctccttatttatcaatgcaaatggaagtatagcaaat

SEQ ID NO: 19943 - DNA, 201 bp, Homo sapiens
ctgaggtgggaggatcacttgagcctggagatgaaggttgcagtgagccgagatcgcatgactgcactccagcctgggtgacagagtgagaccctgtctcaaaaaaaaaaaaaaaaaaaaagtaaagaaagaagaagaaactttctctgcctttctctgcttgttaactggtgtagtcccagagccttaaaaagtacttac

SEQ ID NO: 19944 - DNA, 201 bp, Homo sapiens
gtgtagatcattgtaacatttttaatccaacaaagaaaattttccttttattgcatgaatcagttatgatatacattcagagaaatgacttaccacccagmatttccttatctgtaatctcttgtcagaagagcaaaccattggcttcatgctctgtgtgtaactatagggagatgctctttccttcagtattactggtgt

SEQ ID NO: 19945 - DNA, 201 bp, Homo sapiens
tgcggcaggagaatggcgtgaacccgggaggcggagcttgcagtgagccgagatcccgccactgcactccagcctgggcgacagagcgagactccgtctcaaaaaaaaaaaaaaaaaaaaaaaaatttaaatatacacatacactagacaatggcataattgggaaatggcataaatgagaaaatgtggtttagaatatta

SEQ ID NO: 19946 - DNA, 201 bp, Homo sapiens
aacttcaagtacattcagtaacttggctggagaggtatagggtgacttaactgtgtgtgtaattctgttattgttgctgttgttgtacaggcaatttgagwaaaagtacgaaaggctgtccacaggcagaggttatgtctctcagaaaagaaaagaaagcgtattagcaggatgtgaattcccgctccatcaagagaactc

SEQ ID NO: 19947 - DNA, 201 bp, Homo sapiens
atttgagttaatcccagtggattttaattaatcccacaggattttaagaatttctaatcatgttcagctagttgaagttacacacacacacacacacacacacacaccacacacacacagaatctagatacagcattaacaatcaactcccttgccacagaattacccatttatccaaagtttcaattattaccaggccat

SEQ ID NO: 19948 - DNA, 201 bp, Homo sapiens
tgctgatttgctccaacctcatacagtttcacacataaggacaatcatctatgtttcatgaaagttctatctactttaacattattttgaagtgattggtkgtggtatgaattaacagtttaaatttaaatcctaaaattcagtgtgaattttttataatagcataaaaattcaaagatgtccatacaagaaaaattaaaa

SEQ ID NO: 19949 - DNA, 201 bp, Homo sapiens
tgagttaatcccagtggattttaattaatcccacaggattttaagaatttctaatcatgttcagctagttgaagttacacacacacacacacacacacacacaccacacacacacagaatctagatacagcattaacaatcaactcccttgccacagaattacccatttatccaaagtttcaattattaccaggccatttg

SEQ ID NO: 19950 - DNA, 201 bp, Homo sapiens
aattaaaacaaaacagtagaaacccagggaaagatgaattttctttaaatgagtagaagaataattgataaggccaaaaaaagtcagtttctgggataccaaaaaaaaatctaatgactagttcatttgattctggagatagttatcatattctaatccagaaacaatttatccaggaaagaaaggcctatgatttaccat

SEQ ID NO: 19951 - DNA, 201 bp, Homo sapiens
gttaatcccagtggattttaattaatcccacaggattttaagaatttctaatcatgttcagctagttgaagttacacacacacacacacacacacacacaccacacacacacagaatctagatacagcattaacaatcaactcccttgccacagaattacccatttatccaaagtttcaattattaccaggccatttgtct

SEQ ID NO: 19952 - DNA, 201 bp, Homo sapiens
tagcagtcatataaaagaaaaagagatgtgttcatttttctagttctggggaagcaataaaaactaatagaaaggattaaaaaaacttttttcattgtgtytcacagtttatatctatcattcagcctgccaggagggaaaaaaggctctaacaccattttctaagggatccagaggtcaagatcaaaacttgatccattg

SEQ ID NO: 19953 - DNA, 201 bp, Homo sapiens
aaggggaaaatagtatcgaagtaagataatgctaaaatttttattttctttgctattctttgttatattattatacttgatttgtaaatagatctgtgtttgtgtgtgtgtgtgtgtgcgcgtgtagtcatgcattgcttaacaatgggaataagttctgagaaaagcattgttaggcaatttcatcactgtgcaaacatc

SEQ ID NO: 19954 - DNA, 201 bp, Homo sapiens
attgttgctgttgttgtacaggcaatttgagaaaaagtacgaaaggctgtccacaggcagaggttatgtctctcagaaaagaaaagaaagcgtattagcakgatgtgaattcccgctccatcaagagaactcagagatgtgcaaagtggtgtttgcccctcagccggatagtacttccagcggatggttttgaaactgacc

SEQ ID NO: 19955 - DNA, 201 bp, Homo sapiens
aggggaaaatagtatcgaagtaagataatgctaaaatttttattttctttgctattctttgttatattattatacttgatttgtaaatagatctgtgtttgtgtgtgtgtgtgtgtgcgcgtgtagtcatgcattgcttaacaatgggaataagttctgagaaaagcattgttaggcaatttcatcactgtgcaaacatca

SEQ ID NO: 19956 - DNA, 201 bp, Homo sapiens
tgtcatttcaaatgtcaaacagcagggtattaggcttagttaaatttgccttcgttttctagttggatgtaggcaattcctggaacttgtatacagttggygtctctgtaaccgctggttcctcatcaaattcaaccaacctcagatcaaaaatatttggaaaaaaaacaccaaacaataaaatatagcaaaacgacagta

SEQ ID NO: 19957 - DNA, 201 bp, Homo sapiens
ataatgcctcaaacaaccccttcatcccatgcagccatattttgtcctatatcaaatgtctctttaagtatccttagagctatctcctaatgtgtcctgarcatggcactgagaatctcatgcttccatcaaagagtgtccttcagactgaaagtagcttcatgccgcaaccgtacttttttaatacacctggttgtaaac

SEQ ID NO: 19958 - DNA, 201 bp, Homo sapiens
atcctgctgtctattggggagcttccccaagaaatgaataaatacatgctcgccattgttcaagacatcctacgttttgaaatgcctgcaaggtataatayattgcacatgtctctctgtgtattcaagcttatttgtgtgttcatggggtaccgatgtagctaataataatgatgtggtcattatgcagggttacgttgc

SEQ ID NO: 19959 - DNA, 201 bp, Homo sapiens
tttatttctcaggctatgcctaatgtgcataaggaagtatgtggtctgaagttcactacagtcatggaagaaagagatggagaaagccaccagctcttaayggcctcagcctagaagtgatcctcatagattctatccatggcgtattagccagaactagtcacgtggcccccaccaaatcacaaaggaatctgggaaatg

SEQ ID NO: 19960 - DNA, 201 bp, Homo sapiens
cattgattatataaaagtaaacgagtcagttgtattttcagagaataaaagattgtgctttatagttaaactattaagctgtcactaacttacattaagtkatatctagaatgaacctccacaaatgcattttaaaaaccccaaccttctaatggttgaaatgcagtgaccaccaacccacccacatgattaattggtttg

SEQ ID NO: 19961 - DNA, 201 bp, Homo sapiens
aaacattacttcatataactacctttccccagagccccatgccatgtagtatccttaaaattctatattagttaggtaacaccaggttatgctgcaataamaaatgtccctcaaaatctcagcaatgtgttaaaagtttatttctgagccaggcatggtggctcacgcctgtaatcccaacactttggaaggccgaggcgg

SEQ ID NO: 19962 - DNA, 201 bp, Homo sapiens
atacttctccactcttccccatatcatccattctccccaaccccatgtatgtgtgtgtgtgtgtgtgtgtgtatgtgtgtgtctgtgtgtttgtgtgtgcytgtagcctaatttcagaggttatgaatcctgtggatgaattagatcttaaaaccctttatttttaaaaaatttttcagcctagactctgtcatacaaaga

SEQ ID NO: 19963 - DNA, 201 bp, Homo sapiens; identical to SEQ ID NO: 5173

SEQ ID NO: 19964 - DNA, 201 bp, Homo sapiens; identical to SEQ ID NO: 5174

SEQ ID NO: 19965 - DNA, 201 bp, Homo sapiens
atttaccaaattgtgagttcccactgctatctctaattctaattctaattcaacactacagggttattttttccctcatttcatcattctattttccttcycccactgtgacaactgtggttttcgagaacaccaatatattgattcacctgctcaattctaaaacatacacaatatatttttggaattgccatactgata

SEQ ID NO: 19966 - DNA, 201 bp, Homo sapiens
gcccaagattgatgtctggaaagcaggctgcagccataatcaaagcagttgattcaaagtacacggccattcccattgtggggcaggtcttccagagccastgtaaaggatgtccttctgtaagtgcagacaaatatgggaataatcatgacatcagactctgttttcattttgtctccagtgaaagcatcaactcattca

SEQ ID NO: 19967 - DNA, 201 bp, Homo sapiens
gcttgggtattaacttattaagttctggcagaaattaaatttattatttttatattagggaagcatgacttcttatatttttcaatttccataattatttkagtagctgatttacttcagctatttgtgtattaaatatcttggcaaaagataaaacccacatatcaaaagatctattcagcagtatttaatgagcatcta

SEQ ID NO: 19968 - DNA, 201 bp, Homo sapiens
cctaggagaacaccctttgtaaatgtggatgttcacagttatgagtggggtatgagcctgcagtgtatgttttgcagctctcggagctctggcggtccacmaggaaatacctgcagcctgacaacctttccaaggctgaggctgtcagaaacttcctggccttcattcagcacctcaggactgcgaagaaagaagagatcc

SEQ ID NO: 19969 - DNA, 201 bp, Homo sapiens
tgcaaacttaaattttcaaatcttttaatataattgttgctccagaaagacttcataatgagctttcagttacctctggagatatcacagtttgaaagacrtggctatatacaacttgaataaattactatcttgtttgccaaaagaatggcaattagtatcttgttcactcaaaagaatgattataatatagcatttccc

SEQ ID NO: 19970 - DNA, 201 bp, Homo sapiens
ctatagcctttcagaacttactaggataaaagctacagtcctgtgacagtctgaatggcagctagacaagtgcacaaccagtactatgccacatgtttctkttttatgtttgtcttttgcttatgttttgacctcccggcatcctaattccttattttcactgaatttgtacttgaaaaaatgtaaacctacagaaaagtt

SEQ ID NO: 19971 - DNA, 201 bp, Homo sapiens
caaatgcattttaaaaaccccaaccttctaatggttgaaatgcagtgaccaccaacccacccacatgattaattggtttggttccacatttgccttgggcsagagctcttagaatgtttctctgtccgcattctctgcttaaatccagctgggcttgcctgttactcaaaaggagagtgctcccaaggtggggcttctgga

SEQ ID NO: 19972 - DNA, 201 bp, Homo sapiens
atttttctggaaatctttatagtggaatgaagtatttatttattgatgaaaggcattattaaaaggtaaatttctcatcaaattataagggattacaaacrtaatgtaacaaagcaagtcatcaaagcatgattggatgaattcaggaaaggagacaaattatgagactgaaatgatccaactgagattagtaatattgat

SEQ ID NO: 19973 - DNA, 201 bp, Homo sapiens
tgatgaaaggcattattaaaaggtaaatttctcatcaaattataagggattacaaacataatgtaacaaagcaagtcatcaaagcatgattggatgaattyaggaaaggagacaaattatgagactgaaatgatccaactgagattagtaatattgatttgttatgagattatcgatatctggctaaagtacaaggttaaa

SEQ ID NO: 19974 - DNA, 201 bp, Homo sapiens
tactgtccctatgaaaaatactattgagttcatgttgaacttgactattaactcagtgtcatttcaaatgtcaaacagcagggtattaggcttagttaaabttgccttcgttttctagttggatgtaggcaattcctggaacttgtatacagttggcgtctctgtaaccgctggttcctcatcaaattcaaccaacctcag

SEQ ID NO: 19975 - DNA, 201 bp, Homo sapiens
ggggaaaatagtatcgaagtaagataatgctaaaatttttattttctttgctattctttgttatattattatacttgatttgtaaatagatctgtgtttgtgtgtgtgtgtgtgtgcgcgtgtagtcatgcattgcttaacaatgggaataagttctgagaaaagcattgttaggcaatttcatcactgtgcaaacatcat

SEQ ID NO: 19976 - DNA, 201 bp, Homo sapiens
aaaagaaaaagagatgtgttcatttttctagttctggggaagcaataaaaactaatagaaaggattaaaaaaacttttttcattgtgtttcacagtttatrtctatcattcagcctgccaggagggaaaaaaggctctaacaccattttctaagggatccagaggtcaagatcaaaacttgatccattgcagtgggtcagt

SEQ ID NO: 19977 - DNA, 201 bp, Homo sapiens
gggaaaatagtatcgaagtaagataatgctaaaatttttattttctttgctattctttgttatattattatacttgatttgtaaatagatctgtgtttgtgtgtgtgtgtgtgtgcgcgtgtagtcatgcattgcttaacaatgggaataagttctgagaaaagcattgttaggcaatttcatcactgtgcaaacatcata

SEQ ID NO: 19978 - DNA, 201 bp, Homo sapiens
taataacacatagtttaaaacacattgtataggtgtacaaaaaatattttttctttaaatctttataagcttttttctatttttaaattttttatttttatttttttcttttaaaaatttctggttaaaaattaagacataagcatatatattagcctcggcctacacaaggtcaggatcatcaatatcactgtcttcctc

SEQ ID NO: 19979 - DNA, 201 bp, Homo sapiens
agacaaattatgagactgaaatgatccaactgagattagtaatattgatttgttatgagattatcgatatctggctaaagtacaaggttaaagattttaaragggtatgacaagtctaaagtagagtttttttaaagcctttagaaattattttaaaactatgacatggaaaagccttttatatattaaaataatgattga

SEQ ID NO: 19980 - DNA, 201 bp, Homo sapiens
ctatttcagacacagttaagctctggaaccaccaatgaggtacttaccaatattaataaggattcagcatctcaataaaatttgtaaggatttctacttayacaatttcagtagaagagttactactaaggtaatgctcagaaaaggtgacttgtgtagtgaagtcgcatttgcctatgaaacaattgccatttatcccaa

SEQ ID NO: 19981 - DNA, 201 bp, Homo sapiens
ctttccttctattgggagccttttgttaatacttctccactcttccccatatcatccattctccccaaccccatgtatgtgtgtgtgtgtgtgtgtgtgtrtgtgtgtgtctgtgtgtttgtgtgtgcttgtagcctaatttcagaggttatgaatcctgtggatgaattagatcttaaaaccctttatttttaaaaaatt

SEQ ID NO: 19982 - DNA, 201 bp, Homo sapiens
cagtaattgcttattagtttctgaaattgagttagaggaaaaaggaaacattttaaaacacaaaatcatcattttcaaacattgtttcttcttttacctgttttttttttcatatgtcatttaatgttctaatgtaattttctaatgctgtatgagatggaaattatttaggaaggtggctaataaaactaaacttttctt

SEQ ID NO: 19983 - DNA, 201 bp, Homo sapiens
tgtttgagtgagagagaggggcgttcaaggagaaaattaaaataaaatggggaggggtctttttgagaaagtcttaatcattttttcatttgttcaaattaaaaaaaaaatcacttcttgagaaaactcaaaccaatagaaactctgtgaatggtagagatttttaagtattccttcccctaaacattgatatccatgatt

SEQ ID NO: 19984 - DNA, 201 bp, Homo sapiens
ttgttaatacttctccactcttccccatatcatccattctccccaaccccatgtatgtgtgtgtgtgtgtgtgtgtgtatgtgtgtgtctgtgtgtttgtktgtgcttgtagcctaatttcagaggttatgaatcctgtggatgaattagatcttaaaaccctttatttttaaaaaatttttcagcctagactctgtcata

SEQ ID NO: 19985 - DNA, 201 bp, Homo sapiens
taagaaaccatggactccagagtcagaaaaacctaggtttcaatcccagcaatgccatttaccatttaccagctatatgaccttgaacaaatgactaggtrtatctgcgtctgtttcctagcatgtacaggggaatattaatattaaactgacagagatgttcagtggattaaatgaggtggtagtattagtaacagctaa

SEQ ID NO: 19986 - DNA, 201 bp, Homo sapiens
ggggctagccctaatcctgatgctaccacgccagctggcaccaccctggctcttggaaaggcatgaggaaaatttggcttcctcttttttccactgaggattttttttttccaaatttgacttgggaaacagtcattacaatgaatgtgcagctttttttttcctcatatgttgcagcaaaattgtccgtcgagttctgaa

SEQ ID NO: 19987 - DNA, 201 bp, Homo sapiens
ctatggcctattagagacctcaattttcaagccacttctcactagaattcaaatggcccacaaggaatcccaagcattatgcccttgcctttctttttagrtagatatctctggaaattgtaaagtgacctaccaggctcatcaagacaaagtgatcaaaattaaggccttggattcatgcaaaatagcgaggtctggatt

SEQ ID NO: 19988 - DNA, 201 bp, Homo sapiens
ttttttgttcattgaccccatgaatccaatccataaatttccagggttaagaattccctgtaccacaggttaaaaatccctgaaaaggggattaactcttyaattcaaagctagatagcaaatgtgtaagtgtctcaaaagcaaaattctgagtttgcaatctagaaacataaaaatactttaccaagtatgtgtttattt

SEQ ID NO: 19989 - DNA, 201 bp, Homo sapiens
tatgcctttttttatagacctcagctggtggatgctgtcacctctgctcagacctcagactcattagaagccattttggactttttggatttcaaaagtgmcagcagcattatcctccaggagaggtttctctatgcctgtggatttgcttctcatcccaatgaagaactcctgagagccctcattgtaagtcaaatagaa

SEQ ID NO: 19990 - DNA, 201 bp, Homo sapiens
cgagagatgctgttaattagaactatttattaggttgttgcaaaagtaattgtggtttttgccattacttttgtgacaacctaatattatttttaaaaccrcaatagaataacttagtgtgtgtgagaattacctttatctaaatgctactctaaaaaacatagatataagaaatgaataattcagaccttagcaacagca

SEQ ID NO: 19991 - DNA, 201 bp, Homo sapiens
attcatattgatatgctctctgccttcagaaatgacccagtaaatctttagctaagtgcagctggaatttcacttggaatatcttcttaagattacatagytaaaaggcacttgaaaaagagaaaaaaaaggatccattgcttattaaaagtaatgaataatttaaaaactggcagcaagttattactatagagttagaga

SEQ ID NO: 19992 - DNA, 201 bp, Homo sapiens
gctgaatttctaaaaaacttttttcctccatcataaattaaccttagcttactgtaatatttttacgttaaaaactttttaatttttgttaacttttgaastactctgtaataacacatagtttaaaacacattgtataggtgtacaaaaaatattttttctttaaatctttataagcttttttctatttttaaatttttt

SEQ ID NO: 19993 - DNA, 201 bp, Homo sapiens
gcaacaggatgagttgtcaaaatgtcagcatctgagctataagaaacacttatgggaccaagaggatcaaagaggtcacattagctacaaagttctaatawctttttcctctagttcataggaaagaatctaaataaatatgcactctgggccaaacaaggacataaacctatgctctctctctctttttttttccttttt

SEQ ID NO: 19994 - DNA, 201 bp, Homo sapiens
caattttcaagccacttctcactagaattcaaatggcccacaaggaatcccaagcattatgcccttgcctttctttttaggtagatatctctggaaattgyaaagtgacctaccaggctcatcaagacaaagtgatcaaaattaaggccttggattcatgcaaaatagcgaggtctggatttacgaccccaaatcaggtat

SEQ ID NO: 19995 - DNA, 201 bp, Homo sapiens
ttgtctttgtatcttatcatcctgggggagaaaaaaagtcccctatggcctattagagacctcaattttcaagccacttctcactagaattcaaatggccyacaaggaatcccaagcattatgcccttgcctttctttttaggtagatatctctggaaattgtaaagtgacctaccaggctcatcaagacaaagtgatcaa

SEQ ID NO: 19996 - DNA, 201 bp, Homo sapiens
tttacctgttttttttttcatatgtcatttaatgttctaatgtaattttctaatgctgtatgagatggaaattatttaggaaggtggctaataaaactaawcttttcttatgctctgcactattaatttctctcccatagatattaaacattatgagccatctaagatttttgataattatttcttaattattatagaaaa

SEQ ID NO: 19997 - DNA, 201 bp, Homo sapiens
cgctcacaattatgaccgtttctccaggagtggatcttcttctgcctacactggctacatagaacgtatgtacaccaaaaagaggttctccttccataccycacaacttagcattgctggaactgctattaaattacagttattgtgtgtcatcaggtagtccccgttcggcatctacttacagcctagacattctctact

SEQ ID NO: 19998 - DNA, 201 bp, Homo sapiens
tttttagctgttgcaaatatttaagtttttggccccttgagaagttctagctgcagctcagaagcttcaccattatttacagagcaggcagggagcttgcrtcatgaacattatattgattttatccaggtggttattgaagcccaaggactggaagccttaatcgcagccacccctgacgagggggaggagaaccttgac

SEQ ID NO: 19999 - DNA, 201 bp, Homo sapiens
attgggagccttttgttaatacttctccactcttccccatatcatccattctccccaaccccatgtatgtgtgtgtgtgtgtgtgtgtgtatgtgtgtgtstgtgtgtttgtgtgtgcttgtagcctaatttcagaggttatgaatcctgtggatgaattagatcttaaaaccctttatttttaaaaaatttttcagccta

SEQ ID NO: 20000 - DNA, 201 bp, Homo sapiens
aggccaagatccacatcacaggcctctgctggactgggtggatgaacaagattataattttcaaattaggaagagagaaaaagatgcaaagaaaggaatayttctgaggtgaggcacaccatagctttcatttggaaacaatcatgtttggagtacacatacagaactctcatattttggtcccatagttcacaggcatag

SEQ ID NO: 20001 - DNA, 201 bp, Homo sapiens
agttcataatctttatggaaaatgtacccattcagaatctgataaaagtgatgaggcccctttttactcatacataaaattttataaccctcacccctcctttttttttttttttttttgttcattgaccccatgaatccaatccataaatttccagggttaagaattccctgtaccacaggttaaaaatccctgaaaagg

SEQ ID NO: 20002 - DNA, 201 bp, Homo sapiens
aaacaaaacagtagaaacccagggaaagatgaattttctttaaatgagtagaagaataattgataaggccaaaaaaagtcagtttctgggataccaaaaaraaatctaatgactagttcatttgattctggagatagttatcatattctaatccagaaacaatttatccaggaaagaaaggcctatgatttaccataggag

SEQ ID NO: 20003 - DNA, 201 bp, Homo sapiens
ccttttgttaatacttctccactcttccccatatcatccattctccccaaccccatgtatgtgtgtgtgtgtgtgtgtgtgtatgtgtgtgtctgtgtgtktgtgtgtgcttgtagcctaatttcagaggttatgaatcctgtggatgaattagatcttaaaaccctttatttttaaaaaatttttcagcctagactctgt

SEQ ID NO: 20004 - DNA, 201 bp, Homo sapiens
agagatactctgatgaagacagatataggaagttttttttaacagctttctttctgttactccagatgaaggatgtaaatgttgaaaatgtgaatcagcasagaggagagaagagcatcttcaaaggaaaaagcccatctaaaataatgggaaaggaaaacttggaagctctgcaaagacctacgctccttcatctaatcc

SEQ ID NO: 20005 - DNA, 201 bp, Homo sapiens
ttttgttaatacttctccactcttccccatatcatccattctccccaaccccatgtatgtgtgtgtgtgtgtgtgtgtgtatgtgtgtgtctgtgtgtttrtgtgtgcttgtagcctaatttcagaggttatgaatcctgtggatgaattagatcttaaaaccctttatttttaaaaaatttttcagcctagactctgtca

SEQ ID NO: 20006 - DNA, 201 bp, Homo sapiens
tgcctgacacttatttaaatctgataaatgatgcatttttgcttcatttgtgttctgttcccctctccccaccaggtcaaagagttctactcatatcaaartgaggcagtggccatagaaaatatcaagagaggcctggctagcctatttcagacacagttaagctctggaaccaccaatgaggtacttaccaatattaat

SEQ ID NO: 20007 - DNA, 201 bp, Homo sapiens
tggtacttatcatgagcttctcctgttttcccattttataaactagaacattgggtgacctcatgttttcaaatatacttataaaaaatttaaggccgggygtggtggctcacgcctgtaatcccagcactttgggaggccgaggcgggcggatcacgaggtcaggagatcgagaccatcccggctaaaacggtgaaaccc

SEQ ID NO: 20008 - DNA, 201 bp, Homo sapiens
catcccggctaaaacggtgaaaccccgtctctactaaaaatacaaaaaattagccgggcgtagtggcgggcgcctgtagtcccagctacttgggaggctgmggcaggagaatggcgtgaacccgggaggcggagcttgcagtgagccgagatcccgccactgcactccagcctgggcgacagagcgagactccgtctcaaa

SEQ ID NO: 20009 - DNA, 201 bp, Homo sapiens
aacatttgagtgaaagtgggcagatacatattttttactaaaaggaaaccactcactattcaggtcacacaaaagcataatcacatacacacacacacacmccccccacacacaccccattgttaagctaggtcaacagtaaatgaatgaatgaatgaatgaatgaatgaatgaacaaatggacaagcaaacagcagaatt

SEQ ID NO: 20010 - DNA, 201 bp, Homo sapiens
taatagccaacacttaaacttacacttaacagcgtgataggtattgttccaaacacattaaattcatttaatggtccttacatgtctatgtatttggtgaytattatccttattattcacattgctgagtgtattattctgttctcatgatgctgatagagacatacccgagactggataacttattaaaaaaaaaaaggt

SEQ ID NO: 20011 - DNA, 201 bp, Homo sapiens
tgtctcaaaaaaagaacctactagtctacataccacacttcctcatccccatctgagactatatatattttttctaacatgaggcaatgccaaaaagaggrgctggtgagtgaaagtaagaacagaaagacatggaggcaagtcttatagaataatagccaacacttaaacttacacttaacagcgtgataggtattgttc

SEQ ID NO: 20012 - DNA, 201 bp, Homo sapiens
gaaagttgagaatctgaatacagatttaattaacactctctttgcttgtgaaccccttgggaagtcagccttatcctggtttgaagaattccacttcagcrtttggaatggtgcattttgaaatgtgataggaagaacagcttgtgacacaacacaattcagagaaagcagtggggttaggttcgcaccaaagggttatcg

SEQ ID NO: 20013 - DNA, 201 bp, Homo sapiens
tatgaagggagtgaaaagcagttattccagattagccttaactctgttaacgcttcttttaattgggaggtctctgaatggaaacattttctcacaacagkcatagcatcacttcctactccaggggtgcaatgtccagccctcaccactcctgggcagggaaccatgtactgtaggcatcatccgggaacctttggtttt

SEQ ID NO: 20014 - DNA, 201 bp, Homo sapiens
tcactctgcattttgtgcaaataaacagctgtaaatcataacgttatgatactctcagtgtttaatcataggtcctgcagagatcagcagcttataagaayacaaaatatgcctacttaccaaagtcaagattcagaagctcccagatgaaaagttctaggcttatgagataactctactctctgggacacattaactggt

SEQ ID NO: 20015 - DNA, 201 bp, Homo sapiens
ttctcacaacaggcatagcatcacttcctactccaggggtgcaatgtccagccctcaccactcctgggcagggaaccatgtactgtaggcatcatccgggracctttggttttaataccacttgttactttggctgcaacgctggattcacactcataggagacagcactctcagctgcagaccttcaggacaatggacag

SEQ ID NO: 20016 - DNA, 201 bp, Homo sapiens
ttctgacactcgtggagaattcaatgttggctccacctgccatttctcttgtgacaacggctttaagctggaggggcccaataatgtggaatgcacaactkctggaagatggtcagctactccaccaacctgcaaaggtaataatatgtacttgctaagacagttctacttttggaaatttattctacaacaacaaacaat

SEQ ID NO: 20017 - DNA, 201 bp, Homo sapiens
caaccacaaccactactccaagtgtcatctcccttatgaaatccacaccaatcccattagaagtaatgtgtcacaggcatttcacttctgtccttcctcaygtcacaagctaaagctaatacacaagtactcagagacttaaaggaagaaacatttgcagatgtccaagatgtgttagaaaaatagacatattaaatgtaa

SEQ ID NO: 20018 - DNA, 201 bp, Homo sapiens
catctttgtaccagtgcagttgcaaaatagaatttttaatatgttagcatggaggaagaagcctacataggcaaagttgcctgaagtctatgaaagtcatratgcagccctggctatatcagaatgaagtctttaaggcaaaacaatgccctggaaatgtcagcaagggaggtacaagcatgactaaccctcatgcaggca

SEQ ID NO: 20019 - DNA, 201 bp, Homo sapiens
tagaagtaatgtgtcacaggcatttcacttctgtccttcctcatgtcacaagctaaagctaatacacaagtactcagagacttaaaggaagaaacatttgyagatgtccaagatgtgttagaaaaatagacatattaaatgtaaaacctgctatagaaattggtaaactagaagttgcatattatgtgacagtataaacat

SEQ ID NO: 20020 - DNA, 201 bp, Homo sapiens
ttttgtgtattaatgttctggtcggaaattcatctgagtatgcagaagcatacttgggatcacggcctcttttttggtgaggggtactaacctggcactcmctctcctttactctagaactaacaaaccagaaagaagtggcagcatggacttatcattacagcacaaaagcatactcatggaatatttcccgtaaatact

SEQ ID NO: 20021 - DNA, 201 bp, Homo sapiens
gttgcatattatgtgacagtataaacattccatattttcataataatttgaacctaaataaaaagttaagccatacatgatatttcctgaagagctatcgycctacacataaagcattgagacctatgtttctttcatttttgtatcccccacaaaacatagcacagtgctttgcaaatgtcactactgataaataacatt

SEQ ID NO: 20022 - DNA, 201 bp, Homo sapiens
aaagttgtaattctgggagattatgaaaaagttatttttgtgaaaatgttcacagatgacttcatgtctaggagttacaccagtagacatgtttcaaaaakgtttagtaaattgatttgatgtgtcagatatgaagttgttaattactcaacaatttgagagtactgaactgaaattcactgtgttattttggctatttga

SEQ ID NO: 20023 - DNA, 201 bp, Homo sapiens
attgagacctatgtttctttcatttttgtatcccccacaaaacatagcacagtgctttgcaaatgtcactactgataaataacatttatttgaattaaatytaatttcttgacctttaatttcctatccataaattagaaagaataaccctgaagttccctgaaaatgtagtttaaggaggatgacagtctacttctttca

SEQ ID NO: 20024 - DNA, 201 bp, Homo sapiens
ctgtacattggttttccatgagggagcatataggtcttgaagaggtttgtaaaaatcaaactatctaagtaaatgagacttatctgaccaaggtattgttktcagaatagccttagatttaaagaaagaatagtcacttcatttgtctataacccaacatttattgataaataatagtcttatattagagaattaatgggg

SEQ ID NO: 20025 - DNA, 201 bp, Homo sapiens
acagtgctttgcaaatgtcactactgataaataacatttatttgaattaaatctaatttcttgacctttaatttcctatccataaattagaaagaataacsctgaagttccctgaaaatgtagtttaaggaggatgacagtctacttctttcaaacttccagtgtccagatatgctgaacacttattaagtatttcaataa

SEQ ID NO: 20026 - DNA, 201 bp, Homo sapiens
gatggcaccagaggctgcagaaggccaagaatcaagctagaaggccacatgtcaccgtggaccttcctgccaccagtcactgtccctcaaatgacccaaasaccaatattcaaatgcgtaattaaaagaattttccccaaatgccgtgttcctctattttatggtttgttcagtaaggtctgtatacatcacattgtttac

SEQ ID NO: 20027 - DNA, 201 bp, Homo sapiens
cgtatatctcactataataaaaaattgaacagcaaaaaaaaaaaaaaagaaaaaacaagaaggcaatagaatagatggctatacaccatgatgctgacacytagtctgagttatggaatgtattgtatatgttatctgggagaaaaagacacaatgagctctttgacacacttaaaacggatcataagggattattcaagc

SEQ ID NO: 20028 - DNA, 201 bp, Homo sapiens
gagtgtaatggcacaatctcggcccactgcaacctccgcctcccgggttcaagcaattctcctgtctcagcttcccgagtagctgggactacaggtgcccrccactgcacccagctaatttttgtatttttggtagagatgaggtttcaccatcttagctaggctggtctcaaactcctgacctcaggtgatctgcctgac

SEQ ID NO: 20029 - DNA, 201 bp, Homo sapiens
cactttggccaggctggtctcaaactcccgacctcaagtgattcactcacatcagcctctcaaagtgctgggattataggtgtgagccattgtgctcagcyggatttttggttcttaaatgctctgagtctgtaaaaaccagaggtcaaagcccagagcaaagaggtagtctttacactttgaaaagtttcagaaatagcc

SEQ ID NO: 20030 - DNA, 201 bp, Homo sapiens
gagtgaaagtgggcagatacatattttttactaaaaggaaaccactcactattcaggtcacacaaaagcataatcacatacacacacacacaccccccccmcacacaccccattgttaagctaggtcaacagtaaatgaatgaatgaatgaatgaatgaatgaatgaacaaatggacaagcaaacagcagaattgaatgtc

SEQ ID NO: 20031 - DNA, 201 bp, Homo sapiens
gaaatagctttttcttcttcctttaatgctcttcttcctgcttctcactggctggtttcttgcagtcattcttctctccacttaaacattatctcattaawgaggtcttccctgacgttcctgaccaacatagtgacacagtcattctatcacataagtttcatttcctacctagcacttatggctatattctgttaatat

SEQ ID NO: 20032 - DNA, 201 bp, Homo sapiens
gtttgtttgtttgttttgagacagagtctcactctgtcgcccaggctgaagtgcagtggcacgatctcagctcactgcaacctctgcctcccaggttcaarcgattctcctgcctcagcctcccgaatagctaggattacaggcaactttttgtatttttaatagagactagggtttcaccactttggccaggctggtctc

SEQ ID NO: 20033 - DNA, 201 bp, Homo sapiens
ttgagtgaaagtgggcagatacatattttttactaaaaggaaaccactcactattcaggtcacacaaaagcataatcacatacacacacacacaccccccmcacacacaccccattgttaagctaggtcaacagtaaatgaatgaatgaatgaatgaatgaatgaatgaacaaatggacaagcaaacagcagaattgaatg

SEQ ID NO: 20034 - DNA, 201 bp, Homo sapiens
tcttaatacctataccaatatttcgaatcatctctggcatacgaatgtatttatatccaaaggcaaagctctggaataaataagaaattagtaaaaggtayaatttttctcttataaagtgggagaaaggtgtattttaggcagattgtttttaagaaagtatatatgtgaaagttgagaatctgaatacagatttaatta

SEQ ID NO: 20035 - DNA, 201 bp, Homo sapiens
tttgtttgtttgtttgtttgttttgagacagagtctcactctgtcgcccaggctgaagtgcagtggcacgatctcagctcactgcaacctctgcctcccargttcaaacgattctcctgcctcagcctcccgaatagctaggattacaggcaactttttgtatttttaatagagactagggtttcaccactttggccaggc

SEQ ID NO: 20036 - DNA, 201 bp, Homo sapiens
gtttgtttgtttgtttgtttgtttgtttgttttgagacagagtctcactctgtcgcccaggctgaagtgcagtggcacgatctcagctcactgcaacctcygcctcccaggttcaaacgattctcctgcctcagcctcccgaatagctaggattacaggcaactttttgtatttttaatagagactagggtttcaccactt

SEQ ID NO: 20037 - DNA, 201 bp, Homo sapiens
gtttttgtttgtttgtttgtttgtttgtttgtttgtttgttttgagacagagtctcactctgtcgcccaggctgaagtgcagtggcacgatctcagctcastgcaacctctgcctcccaggttcaaacgattctcctgcctcagcctcccgaatagctaggattacaggcaactttttgtatttttaatagagactagggt

SEQ ID NO: 20038 - DNA, 201 bp, Homo sapiens
tagaggattttggtgtttttgtttgtttgtttgtttgtttgtttgtttgtttgttttgagacagagtctcactctgtcgcccaggctgaagtgcagtggcrcgatctcagctcactgcaacctctgcctcccaggttcaaacgattctcctgcctcagcctcccgaatagctaggattacaggcaactttttgtattttta

SEQ ID NO: 20039 - DNA, 201 bp, Homo sapiens
agagagaaacactagaggattttggtgtttttgtttgtttgtttgtttgtttgtttgtttgtttgttttgagacagagtctcactctgtcgcccaggctgragtgcagtggcacgatctcagctcactgcaacctctgcctcccaggttcaaacgattctcctgcctcagcctcccgaatagctaggattacaggcaactt

SEQ ID NO: 20040 - DNA, 201 bp, Homo sapiens
tttcttgcctaaaacataagagagaagagagaaacactagaggattttggtgtttttgtttgtttgtttgtttgtttgtttgtttgtttgttttgagacasagtctcactctgtcgcccaggctgaagtgcagtggcacgatctcagctcactgcaacctctgcctcccaggttcaaacgattctcctgcctcagcctccc

SEQ ID NO: 20041 - DNA, 201 bp, Homo sapiens
aataaacaaaacaattagtgaggagattcaaatggaagaaatagtttgaggcagaaagcaatcattgcagttttaggtgtgttgaatttgagaagatggcrtgatatatgggagcaagtagtctcaggcaagaggaagggcggaaatgaaatcctggattgcacccattcaagtaagatagagggagctgcggcaggctac

SEQ ID NO: 20042 - DNA, 201 bp, Homo sapiens
tatgtaagatccaccttgaaatggactggaaaattcataaatactctcactcatcctcttgtcctataacccaaggatcccaaatgcaaatgcctccgggrgataggcagattacacaagtgtcaggatgtctggccatagacagtagggcatggcccttgctaactccttatcagggtctttacccagacctgaaggctc

SEQ ID NO: 20043 - DNA, 201 bp, Homo sapiens
catctgcactgagcattggcatgcctttctttatcagatattcactgagaacctactatgggccatgtcctttgtgcttgggaccagggatgagatgaaayggtgcgtgaagccagtcttaggcacatgtccactatagtatagtcaaggtgaggtttgcactgattgacacatatagggtgcattggaatgaagaagatg

SEQ ID NO: 20044 - DNA, 201 bp, Homo sapiens
tcgaatcatctctggcatacgaatgtatttatatccaaaggcaaagctctggaataaataagaaattagtaaaaggtataatttttctcttataaagtggragaaaggtgtattttaggcagattgtttttaagaaagtatatatgtgaaagttgagaatctgaatacagatttaattaacactctctttgcttgtgaacc

SEQ ID NO: 20045 - DNA, 201 bp, Homo sapiens
tatcctggtttgaagaattccacttcagcatttggaatggtgcattttgaaatgtgataggaagaacagcttgtgacacaacacaattcagagaaagcagyggggttaggttcgcaccaaagggttatcgatcactctgcattttgtgcaaataaacagctgtaaatcataacgttatgatactctcagtgtttaatcata

SEQ ID NO: 20046 - DNA, 201 bp, Homo sapiens
aactgccaaatagccatcttgtaccagagattccagagagtggtctttggaatttcccaactcctttgcttcagtgccctgatctctggtaaactttatgytaacttttcacttaggcctaagtaattagggtagagcccagatctatgtgtgagaaatttaaggattgtagccagttggtttgaggcatgggaaaactgt

SEQ ID NO: 20047 - DNA, 201 bp, Homo sapiens
tttaaataaacaggaaagaaacccatttccaggcctgattgcttgctttgtacacctcttcatgtgggaaatggcctctcctgccccgggtggactcccayagactatgataagagtgctgtagtacctttatacttttgaaacgcacattctttagttcatttggtatcaaaaacacttgtgaaaaagggctgttctgag

SEQ ID NO: 20048 - DNA, 201 bp, Homo sapiens
aaaagttgaagaattcagaggagaagagttcaggctgtggtgatcagcagagtcttcagagactttacgagttaaatcctggaggattagtgggattttaygccataaaagtggaaaaattctcaggggaatgtgagccaagaaccagaagcaataacacacaaagtcacttcagggaattccaagaaactaatctatctt

SEQ ID NO: 20049 - DNA, 201 bp, Homo sapiens
aagttgaagaattcagaggagaagagttcaggctgtggtgatcagcagagtcttcagagactttacgagttaaatcctggaggattagtgggattttacgycataaaagtggaaaaattctcaggggaatgtgagccaagaaccagaagcaataacacacaaagtcacttcagggaattccaagaaactaatctatcttga

SEQ ID NO: 20050 - DNA, 201 bp, Homo sapiens
aacacttctgaacctcacttttcttgcctaaaacataagagagaagagagaaacactagaggattttggtgtttttgtttgtttgtttgtttgtttgtttrtttgtttgttttgagacagagtctcactctgtcgcccaggctgaagtgcagtggcacgatctcagctcactgcaacctctgcctcccaggttcaaacgat

SEQ ID NO: 20051 - DNA, 201 bp, Homo sapiens
tgaagaattcagaggagaagagttcaggctgtggtgatcagcagagtcttcagagactttacgagttaaatcctggaggattagtgggattttacgccatraaagtggaaaaattctcaggggaatgtgagccaagaaccagaagcaataacacacaaagtcacttcagggaattccaagaaactaatctatcttgaccag

SEQ ID NO: 20052 - DNA, 201 bp, Homo sapiens
cattcaagtaagatagagggagctgcggcaggctacgaggtctctgaagcagagggtgtagagaaaatagggtgacattgtaagttcttgagtatggctgyctaaatctttgacttctttgtcttcgtgacttgtacctatactcttctctgtaagcttaccatcctcccactgccctttgcagcaaatgacctacatgat

SEQ ID NO: 20053 - DNA, 201 bp, Homo sapiens
ccatgtatatttggctttctgctgaatttcttatatttctgtaccatttcttgcttctttttaaaatagcaacaacaatgactcctctgatttcttctctkggccaggagaatcatctcctcaaggatgatttttaataattttcctcatctggttttctatctctgacactgatagtttttcttaacttccttaaatagc

SEQ ID NO: 20054 - DNA, 201 bp, Homo sapiens
tctgtccttcctcatgtcacaagctaaagctaatacacaagtactcagagacttaaaggaagaaacatttgcagatgtccaagatgtgttagaaaaatagrcatattaaatgtaaaacctgctatagaaattggtaaactagaagttgcatattatgtgacagtataaacattccatattttcataataatttgaacctaa

SEQ ID NO: 20055 - DNA, 201 bp, Homo sapiens
tattgttgtcagaatagccttagatttaaagaaagaatagtcacttcatttgtctataacccaacatttattgataaataatagtcttatattagagaatyaatggggagaaaagaataatgctaagaaaatatgtaactgcaataatttgtaaaaatacttttggggggaaattgtgaattaaaatttaaattcatttat

SEQ ID NO: 20056 - DNA, 201 bp, Homo sapiens
ataggtcttgaagaggtttgtaaaaatcaaactatctaagtaaatgagacttatctgaccaaggtattgttgtcagaatagccttagatttaaagaaagawtagtcacttcatttgtctataacccaacatttattgataaataatagtcttatattagagaattaatggggagaaaagaataatgctaagaaaatatgta

SEQ ID NO: 20057 - DNA, 201 bp, Homo sapiens
taatgtacttttagtagagacagggtttcactatgttggccaggctggtcttgaattcctgacctcatgatccgcccacctcagcctcccaaagtgctggsattacaggcatgagccactgtgcctggccccaaaaacattttaaaaatattcatagatttgatgaaatcccaacagaagagagttcatgagaaataatag

SEQ ID NO: 20058 - DNA, 201 bp, Homo sapiens
aaataatattttaatagctttagttaaatattccacagtttcaagaacatcctggccaacatggtgaaaccccgtttctactaaaaatacaaaaaatagcygggcatggtggtgcatgcctgtagtcccagctactcgggaggctgaggcaggagaatcgcttgaacccaggaggtggaggttgcagtgagctgagattgt

SEQ ID NO: 20059 - DNA, 201 bp, Homo sapiens
tatattccccaagctttttccccctcaatgtatccaattccttagttaacttttatagacaatgctgctttttaaacgcaagattttcatttataaaaathtgcagaaatataataaagaaatgaagaaatatcctcttaaatactcctatcctaaaatagacactgttaggcttctggtatgaattcttccaatattttc

SEQ ID NO: 20060 - DNA, 201 bp, Homo sapiens
atgaagcatcatgaaattcaaacaatcacttttagccaaataccatcgttgtatattaatcacacacacacacacacacacacacacacacacacacacasagagagagagagggagaaagagagagagagttacagagttcaggttgctgaattataaaatgatctcttcttttctcctctgccatgcccatgatagcca

SEQ ID NO: 20061 - DNA, 201 bp, Homo sapiens
tgatgaagcatcatgaaattcaaacaatcacttttagccaaataccatcgttgtatattaatcacacacacacacacacacacacacacacacacacacasacagagagagagagggagaaagagagagagagttacagagttcaggttgctgaattataaaatgatctcttcttttctcctctgccatgcccatgatagc

SEQ ID NO: 20062 - DNA, 201 bp, Homo sapiens
aggcttggtcatgtcgcatgctttatcatccaaaacagcaatgcagcatgggatttagaagcctggaggttaatgaaggttaaaaaaaaaaaaaaaaaaaagtacagtggaaagagctctttcttgtttcaaagtcaagctctgctactgtcattctgaacgtgttatttagatgccccaagcttcagtattttcatgtgc

SEQ ID NO: 20063 - DNA, 201 bp, Homo sapiens
tgataaataacatttatttgaattaaatctaatttcttgacctttaatttcctatccataaattagaaagaataaccctgaagttccctgaaaatgtagtytaaggaggatgacagtctacttctttcaaacttccagtgtccagatatgctgaacacttattaagtatttcaataaacacatactgacatgccagttgat

SEQ ID NO: 20064 - DNA, 201 bp, Homo sapiens
atttcaataaacacatactgacatgccagttgatcacaaatgtagtaataacatttagactaacagtattttaagaaccaaaattttgtaaatagtatatktggaggcaagatttatcaatgcattagcaggtatttgtcggatgctactatgtgtccatctttgcatcttggttctttggatatcacccttcgagagaat

SEQ ID NO: 20065 - DNA, 201 bp, Homo sapiens
aatttttttttaatgtacttttagtagagacagggtttcactatgttggccaggctggtcttgaattcctgacctcatgatccgcccacctcagcctcccraagtgctgggattacaggcatgagccactgtgcctggccccaaaaacattttaaaaatattcatagatttgatgaaatcccaacagaagagagttcatga

SEQ ID NO: 20066 - DNA, 201 bp, Homo sapiens
ctaatttttttttaatgtacttttagtagagacagggtttcactatgttggccaggctggtcttgaattcctgacctcatgatccgcccacctcagcctcycaaagtgctgggattacaggcatgagccactgtgcctggccccaaaaacattttaaaaatattcatagatttgatgaaatcccaacagaagagagttcat

SEQ ID NO: 20067 - DNA, 201 bp, Homo sapiens
agcacccgccaccacacctgtctaatttttttttaatgtacttttagtagagacagggtttcactatgttggccaggctggtcttgaattcctgacctcakgatccgcccacctcagcctcccaaagtgctgggattacaggcatgagccactgtgcctggccccaaaaacattttaaaaatattcatagatttgatgaaa

SEQ ID NO: 20068 - DNA, 201 bp, Homo sapiens
gataactctactctctgggacacattaactggtttgagttgagttctccctggtatctggtcaggctgtagtcaaaagtgcatgaacacatgcacacacaygaccccacactgtcccatgcaccctactgggcgtgacacatacacaaccccacactgtcccatgcaccctacataatccatcactgggcgtgacacacac

SEQ ID NO: 20069 - DNA, 201 bp, Homo sapiens
ttttgcatttttagtagagacgaggttttaccatgttgccaggctgttctcgaactcctgacctcaagtgatctgcccaccttggcctcccaaagtgctgrgattagaggcatgagccactgcaccagcccagttctttattaaagtaaaattaaagataatcatggtacttaatgaaggcttacacaggcacaggatgtt

SEQ ID NO: 20070 - DNA, 201 bp, Homo sapiens
gagtgcagtagtgccatctcagctcactgcaacctctgtctcctgggttcaagcgattctcctgtctcagccttctgagtagctgggattacaggcatgcrccaccatgcccagctaatttttgtattttttagtggagttggtttcgccatgttggcaaggctggtcttgaacttctgacctcaagggatctgcctgcct

SEQ ID NO: 20071 - DNA, 201 bp, Homo sapiens
ggagtgcagtagtgccatctcagctcactgcaacctctgtctcctgggttcaagcgattctcctgtctcagccttctgagtagctgggattacaggcatghgccaccatgcccagctaatttttgtattttttagtggagttggtttcgccatgttggcaaggctggtcttgaacttctgacctcaagggatctgcctgcc

SEQ ID NO: 20072 - DNA, 201 bp, Homo sapiens
ctgggatgggagttatggaagactcaaggatgaatcattcttgggttttagacactttcccatccagtagaagagtgagggtatgacatgggacatgacarcacatcagttcagacaaaaagttgaagaattcagaggagaagagttcaggctgtggtgatcagcagagtcttcagagactttacgagttaaatcctggag

SEQ ID NO: 20073 - DNA, 201 bp, Homo sapiens
tggagtgcagtagtgccatctcagctcactgcaacctctgtctcctgggttcaagcgattctcctgtctcagccttctgagtagctgggattacaggcatrcgccaccatgcccagctaatttttgtattttttagtggagttggtttcgccatgttggcaaggctggtcttgaacttctgacctcaagggatctgcctgc

SEQ ID NO: 20074 - DNA, 201 bp, Homo sapiens
ggctggagtgcagtagtgccatctcagctcactgcaacctctgtctcctgggttcaagcgattctcctgtctcagccttctgagtagctgggattacaggsatgcgccaccatgcccagctaatttttgtattttttagtggagttggtttcgccatgttggcaaggctggtcttgaacttctgacctcaagggatctgcc

SEQ ID NO: 20075 - DNA, 201 bp, Homo sapiens
catctgggctttgctaccaacaagttgtatagttctgcatcctcaacaactctcatattcacctcccctatttgcattcccactgatgccagaccaaaccwgtccctctttaactctcactgggaccattgcaatagcctcttcttttgcagtgcaatctccctgattgtaactcatttaaaaaaaaaaaagtatcgcact

SEQ ID NO: 20076 - DNA, 201 bp, Homo sapiens
agcaggctggagtgcagtagtgccatctcagctcactgcaacctctgtctcctgggttcaagcgattctcctgtctcagccttctgagtagctgggattasaggcatgcgccaccatgcccagctaatttttgtattttttagtggagttggtttcgccatgttggcaaggctggtcttgaacttctgacctcaagggatc

SEQ ID NO: 20077 - DNA, 201 bp, Homo sapiens
atgttggctccacctgccatttctcttgtgacaacggctttaagctggaggggcccaataatgtggaatgcacaacttctggaagatggtcagctactccrccaacctgcaaaggtaataatatgtacttgctaagacagttctacttttggaaatttattctacaacaacaaacaattatctagttcttatatgtgaact

SEQ ID NO: 20078 - DNA, 201 bp, Homo sapiens
acaatgactcctctgatttcttctcttggccaggagaatcatctcctcaaggatgatttttaataattttcctcatctggttttctatctctgacactgayagtttttcttaacttccttaaatagctcttgcaggagcctcccttgttatgaagggagtgaaaagcagttattccagattagccttaactctgttaacgc

SEQ ID NO: 20079 - DNA, 201 bp, Homo sapiens
taggatctcccaatcttcagcaggctggagtgcagtagtgccatctcagctcactgcaacctctgtctcctgggttcaagcgattctcctgtctcagcctyctgagtagctgggattacaggcatgcgccaccatgcccagctaatttttgtattttttagtggagttggtttcgccatgttggcaaggctggtcttgaac

SEQ ID NO: 20080 - DNA, 201 bp, Homo sapiens
tacttctttcaaacttccagtgtccagatatgctgaacacttattaagtatttcaataaacacatactgacatgccagttgatcacaaatgtagtaataayatttagactaacagtattttaagaaccaaaattttgtaaatagtatatttggaggcaagatttatcaatgcattagcaggtatttgtcggatgctactat

SEQ ID NO: 20081 - DNA, 201 bp, Homo sapiens
aaacttcagttatggatcaatctgctctttccattgtctagagggccagttacttaatggctctgcacaaacagcatgccaagagaatggccactggtcamctaccgtgccaacctgccaaggtacaattttcatgtgggttaagaagtcactttgatgtggaaaataacaaaatcagtgtttcttccctgtgtctttctc

SEQ ID NO: 20082 - DNA, 201 bp, Homo sapiens
gacatgccagttgatcacaaatgtagtaataacatttagactaacagtattttaagaaccaaaattttgtaaatagtatatttggaggcaagatttatcawtgcattagcaggtatttgtcggatgctactatgtgtccatctttgcatcttggttctttggatatcacccttcgagagaatattttcatatatgtgctgt

SEQ ID NO: 20083 - DNA, 201 bp, Homo sapiens
gtgatggacaaaatttgtccaaggactcacactattattctgtggttggttttagctgcccagtgcccacccctgaagattcctgaacgaggaaacatgayctgccttcattctgcaaaagcattccagcatcagtctagctgcagcttcagttgtgaagagggatttgcattagttggaccggaagtggtgcaatgcaca

SEQ ID NO: 20084 - DNA, 201 bp, Homo sapiens
aaagagaccaagtagagatggatagcttgggttaaaagtttagaaaattagagttaagagggttacacaaatagttacagctttcagcaaacatgacattsctgttaattctacatggaaaataaaaatcactattttgtctcctgcagtgagagagtgtggagaacttgagctccctcaacacgtgctcatgaactgcag

SEQ ID NO: 20085 - DNA, 201 bp, Homo sapiens
atattccccttataatgagccctcctgaaaatcagtctactggttttccccagtaatttctatccttaatgaccctctctttcatcttgttttttttttttaatcattcattcttgtcttcttgctgattttagatgatgggaaatgccccttgaatcctcacaggtaaggtagaaatgttttatgattgagtaaattttg

SEQ ID NO: 20086 - DNA, 201 bp, Homo sapiens
ttaattctacatggaaaataaaaatcactattttgtctcctgcagtgagagagtgtggagaacttgagctccctcaacacgtgctcatgaactgcagccaycctctgggaaacttctcttttaactcgcagtgcagcttccactgcactgacgggtaccaagtaaatgggcccagcaagctggaatgcttggcttctggaa

SEQ ID NO: 20087 - DNA, 201 bp, Homo sapiens
tcttgcaggagcctcccttgttatgaagggagtgaaaagcagttattccagattagccttaactctgttaacgcttcttttaattgggaggtctctgaatkgaaacattttctcacaacaggcatagcatcacttcctactccaggggtgcaatgtccagccctcaccactcctgggcagggaaccatgtactgtaggcat

SEQ ID NO: 20088 - DNA, 201 bp, Homo sapiens
actgccttggtagtcagtgaaaatagaacactaagcgtgcaataaatgcaaaccttatctgttttctatttttgtaattattcaggagtttttttttttttgccaaagttttagagtaggctcaagaatatgaccacttctcaaagttatgcacaaaagtcattcctgggtataactcttttcctgcatctgcactaatct

SEQ ID NO: 20089 - DNA, 201 bp, Homo sapiens
tacacttcttatgtcttgcatgtgtgtgtgtttgttttgtagcaggaccattgactatccaggaagccctgacttactttggtggagcggtggcttctacrataggtctgataatgggtgggacgctcctggctttgctaagaaagcgtttcagacaaaaaggtaaataggaaagagtcttctctttgcatcttggttaca

SEQ ID NO: 20090 - DNA, 201 bp, Homo sapiens
ccagattagccttaactctgttaacgcttcttttaattgggaggtctctgaatggaaacattttctcacaacaggcatagcatcacttcctactccagggktgcaatgtccagccctcaccactcctgggcagggaaccatgtactgtaggcatcatccgggaacctttggttttaataccacttgttactttggctgcaa

SEQ ID NO: 20091 - DNA, 201 bp, Homo sapiens
agtgcccagaactctttgccccagagcagggcagcctggattgttctgacactcgtggagaattcaatgttggctccacctgccatttctcttgtgacaayggctttaagctggaggggcccaataatgtggaatgcacaacttctggaagatggtcagctactccaccaacctgcaaaggtaataatatgtacttgctaa

SEQ ID NO: 20092 - DNA, 201 bp, Homo sapiens
catcaagtgcccagaactctttgccccagagcagggcagcctggattgttctgacactcgtggagaattcaatgttggctccacctgccatttctcttgtracaacggctttaagctggaggggcccaataatgtggaatgcacaacttctggaagatggtcagctactccaccaacctgcaaaggtaataatatgtactt

SEQ ID NO: 20093 - DNA, 201 bp, Homo sapiens
ttgatactctagccatcaagtgcccagaactctttgccccagagcagggcagcctggattgttctgacactcgtggagaattcaatgttggctccacctgycatttctcttgtgacaacggctttaagctggaggggcccaataatgtggaatgcacaacttctggaagatggtcagctactccaccaacctgcaaaggta

SEQ ID NO: 20094 - DNA, 201 bp, Homo sapiens
tacggtgaggcttcctttttgttgatattattttggttttatgctagagatgatgccaagaagtaaataaatcatgttgaagtctctccagtgagaatagratggtaccagcccccctctatcatctgtctcctccactcagtgtccctagacacacactctaggtaaaaacattttattcttgggagaaaacattgactc

SEQ ID NO: 20095 - DNA, 201 bp, Homo sapiens
gtgtaacatttccattattaactgctaggtggtgatgatgtggccttgcctgcaaagcagaagtcaggactgctgaaaaatgtttacgaactgttatggartcaattccctatgctacctgctggaaaaacaaaaataatctgatgctatccctctcccaaaaagtgggtagttgagtgtcctacaaaaagcctgaatggc

SEQ ID NO: 20096 - DNA, 201 bp, Homo sapiens
tgttttatctaagcttcactgttaggctacatgatgttgggatctggggcctgtcctctggctccgcagctgctgttcctcctactagaatttataggggmtctctgagaatagatcatggtaaacctgtcaccccattttccaagactgtacttctctctgggataaatgatggaataaatggaagactgggtaggtgcc

SEQ ID NO: 20097 - DNA, 201 bp, Homo sapiens
caaataaagccatcgtggtttacagaggctgtgttttatctaagcttcactgttaggctacatgatgttgggatctggggcctgtcctctggctccgcagstgctgttcctcctactagaatttataggggctctctgagaatagatcatggtaaacctgtcaccccattttccaagactgtacttctctctgggataaat

SEQ ID NO: 20098 - DNA, 201 bp, Homo sapiens
gtaagcagtctgggttgggcagaaggcagaaaaccagcagagtcacagaggagatggtgagtttatttttttctgcatgggaagtggttgaagtgagttgragtggtatggagtaaagtcaggcaggtaaaggttcagaaagtgaggaacagcgatagccatggagttttatgttgaattgcctattagattttgtgagta

SEQ ID NO: 20099 - DNA, 201 bp, Homo sapiens
cctcctttttacaatgtcttttgcaatgtcttcttttctactctgaagtaaaatacacagataacaaatattctaattaaaatataaagtaggaataaaaygaaaagtaatttataataaaaacaagatgcaaaaacttaggcgctgtgccagtagatgcaatgaggtcatcagaagcgtgcaccttccacagaatcacta

SEQ ID NO: 20100 - DNA, 201 bp, Homo sapiens
aatagattttttggtatgcatcttgattacatacttagcataaattcttgggtccaaaagcatgataacttaaaaattattgacacatgttgccaagatgytcaacaaaggtttagcatttcctaataaaatccttcatgtgccgttataattaaatgacactttttcttatcttctatgttaaacaagcccaattcagga

SEQ ID NO: 20101 - DNA, 201 bp, Homo sapiens
gggttgggcagaaggcagaaaaccagcagagtcacagaggagatggtgagtttatttttttctgcatgggaagtggttgaagtgagttggagtggtatggrgtaaagtcaggcaggtaaaggttcagaaagtgaggaacagcgatagccatggagttttatgttgaattgcctattagattttgtgagtacttttaaactt

SEQ ID NO: 20102 - DNA, 201 bp, Homo sapiens
tttttatttaacatcatacattgagacctctctcctatctttacaagttaaaatatattatttttagtgacctttaacattcttttcatggatccaccatmattaatttccaccctcaattaatggcatttgtgtttgttttcaatattccgctcttacaaataatgtcttcacaaaaatctctaaatagattttttggta

SEQ ID NO: 20103 - DNA, 201 bp, Homo sapiens
aacatggtgaaacaccatatttactaaacttacaaaaactggctgggcatgttggcatgtgcctgtaatcccagctactcaggaggctgaggcaggacaawctcttgaacccaggaggtggaggtggcagtgagttgagatcacaccactgaactccagcctgggtgacagagcaagacttgtctcaaaaacaaaacaaaa

SEQ ID NO: 20104 - DNA, 201 bp, Homo sapiens
atggagtttttacaaacgctgcatttgacccgagtccttaaggtaagatccctataaagatatttttgaaggaaatagaacactagggaaaaatggaagaytataaagcttaacttttctttacataatcatatattaaattttaagtatgtattaaattttcaggcatgaaggaaattgtgttggcagtaggacacaggt

SEQ ID NO: 20105 - DNA, 201 bp, Homo sapiens
gtggggagtggtggctgccccatcttaggcattcgaagtctgaaagacttcctgcagaacagcagataaatgctaagttggcttggaagtgacctttatgktctcctatagctctgaaataacctgtaagaggtgaatcttggtatttggtgatgcatagaaacagaaaagtatgtcagattaaagcaggggatgcacact

SEQ ID NO: 20106 - DNA, 201 bp, Homo sapiens
ggcttctggtatgaattcttccaatattttctccgcttttcctcctatgcaattaatatttttatgatgtatatacaattttaacaataaagttgaatggrtaaaagactagacagttctacattatttgccatacctttcactttgtatagactttcaacatttgagtgaaagtgggcagatacatattttttactaaaa

SEQ ID NO: 20107 - DNA, 201 bp, Homo sapiens
agtggtggctgccccatcttaggcattcgaagtctgaaagacttcctgcagaacagcagataaatgctaagttggcttggaagtgacctttatgttctccyatagctctgaaataacctgtaagaggtgaatcttggtatttggtgatgcatagaaacagaaaagtatgtcagattaaagcaggggatgcacactgacttg

SEQ ID NO: 20108 - DNA, 201 bp, Homo sapiens
aagtgggtagttgagtgtcctacaaaaagcctgaatggcagaatattcgaaatctagaaagaaaagattatgctgcgcctcagggtgtagatatgatgagyaatttttttctttcttttatttttttaaggaaatgataattatttaaatttctttggtctcatttccagagacctgtccttttcctggtctcctcattca

SEQ ID NO: 20109 - DNA, 201 bp, Homo sapiens
tctgaccttttacattctgcctcatttattggcaatgttaggttacaaaagaaactataatctctttcacctccaatccacatgttgtttctcttgcattmtttcttttctgcagctgtgaaatgctcagaactacatgttaataagccaatagcgatgaactgctccaacctctggggaaacttcagttatggatcaatc

SEQ ID NO: 20110 - DNA, 201 bp, Homo sapiens
gtgcccagcttccgttggcttatcattgcacttagaataaaatctcatccccttgttttggatcccaaagcccgatgtgatctgtcactacccccggctcrtatttttctctccattgctcattccattctggccacactaatgtcttcatgttctttgaacacactgcagtttgcttccaccttaaggcctttgaaatag

SEQ ID NO: 20111 - DNA, 201 bp, Homo sapiens
gggttggccactgtgatgggagactgggagcctcaccgactccttcgccctacacactcttgtgagctggccccaaagccagggaaatccctagaaatackctgttcagggagaaaaccacttccacaggaagagtaccactaaatttaaaatcgttgcactccttctgcaatctgtctgaatagaggcaaagcccaggtt

SEQ ID NO: 20112 - DNA, 201 bp, Homo sapiens
aataaacttggagattgtgacactcttaatttgatactctagccatcaagtgcccagaactctttgccccagagcagggcagcctggattgttctgacacycgtggagaattcaatgttggctccacctgccatttctcttgtgacaacggctttaagctggaggggcccaataatgtggaatgcacaacttctggaagat

SEQ ID NO: 20113 - DNA, 201 bp, Homo sapiens
gttaaaatgtttttcttttctattgagttagcatgacaactactttcagtacacaattaaataaagtaaatatactgcaagttttgacaagtaacttaaamctttatatttaaattgctattaaagattcatctctaagacaggaggagctttccctcatttgttcatatatccatgaatgaatattacttatcaacaaaa

SEQ ID NO: 20114 - DNA, 201 bp, Homo sapiens
gaaaacggatttgctgcaatatcatttacaatattcaaattcttaatacctataccaatatttcgaatcatctctggcatacgaatgtatttatatccaarggcaaagctctggaataaataagaaattagtaaaaggtataatttttctcttataaagtgggagaaaggtgtattttaggcagattgtttttaagaaagt

SEQ ID NO: 20115 - DNA, 201 bp, Homo sapiens
ctctcagtgtttaatcataggtcctgcagagatcagcagcttataagaacacaaaatatgcctacttaccaaagtcaagattcagaagctcccagatgaaragttctaggcttatgagataactctactctctgggacacattaactggtttgagttgagttctccctggtatctggtcaggctgtagtcaaaagtgcatg

SEQ ID NO: 20116 - DNA, 201 bp, Homo sapiens
agagcccagatctatgtgtgagaaatttaaggattgtagccagttggtttgaggcatgggaaaactgtccaagtccagattgctggaagacaaatgtaccyaacgccatcatattggtagaaagggcataggaaagaacttaaaatgatatatccaggacgaatgtatccattaggcacagtagacacagacgcacaaaat

SEQ ID NO: 20117 - DNA, 201 bp, Homo sapiens
gcctttaggtaccagtcagtctgcagcttcacctgcaatgaaggcttgctcctggtgggagcaagtgtgctacagtgcttggctactggaaactggaattytgttcctccagaatgccaaggtaagagtgtattctttctaacatcatggaaataaattgtaggcagtatttttaaaggctggattttagaggtgacaact

SEQ ID NO: 20118 - DNA, 201 bp, Homo sapiens
gccatcatattggtagaaagggcataggaaagaacttaaaatgatatatccaggacgaatgtatccattaggcacagtagacacagacgcacaaaattttyaaagacccacacacgtctgaatttcttttataattattttctttgaagtcaaagaaaatgttttaatatatagtgatatattcatctttgtaccagtgca

SEQ ID NO: 20119 - DNA, 201 bp, Homo sapiens
tgaaggaaccatggactgtgttcatccgctcactgcttttgcctatggctccagctgtaaatttgagtgccagcccggctacagagtgaggggcttggacrtgctccgctgcattgactctggacactggtctgcacccttgccaacctgtgagggtaggatttttcattagcaacctccattctgtccaagaaggaatca

SEQ ID NO: 20120 - DNA, 201 bp, Homo sapiens
agaaagggcataggaaagaacttaaaatgatatatccaggacgaatgtatccattaggcacagtagacacagacgcacaaaattttcaaagacccacacaygtctgaatttcttttataattattttctttgaagtcaaagaaaatgttttaatatatagtgatatattcatctttgtaccagtgcagttgcaaaatagaa

SEQ ID NO: 20121 - DNA, 201 bp, Homo sapiens
accattgctctctgtgtggcttttctcctttctcagtatctttctctttatccttggttattctctccagctgtgcagtgtcagcacctggaagcccccartgaaggaaccatggactgtgttcatccgctcactgcttttgcctatggctccagctgtaaatttgagtgccagcccggctacagagtgaggggcttggac

SEQ ID NO: 20122 - DNA, 201 bp, Homo sapiens
ttctgagccctatcttaataagggagtattcagacatggaagaagtagagtagttaatgaaagacaaacagccaagaagaatggaaagactataagattgyagatcaggatatctgatttcccacccgggttctgccacaaacctactgtgtttcactcattcaacaagtatttattgaaggcctattaagtgctaaactc

SEQ ID NO: 20123 - DNA, 201 bp, Homo sapiens
tgaaataatataaatcaatatgtttaagaattcagatgcaatcatgtatactttcttgatggactatagaagaacaccaatgaatacccatatgtgatagmactgccttggtagtcagtgaaaatagaacactaagcgtgcaataaatgcaaaccttatctgttttctatttttgtaattattcaggagtttttttttttt

SEQ ID NO: 20124 - DNA, 201 bp, Homo sapiens
ttattatacttctttgcaaaataaaaatataaaatttcaattttctacaactgtaagtctctatgtgttaaaatgtttttcttttctattgagttagcatkacaactactttcagtacacaattaaataaagtaaatatactgcaagttttgacaagtaacttaaacctttatatttaaattgctattaaagattcatctc

SEQ ID NO: 20125 - DNA, 201 bp, Homo sapiens
ttctacaactgtaagtctctatgtgttaaaatgtttttcttttctattgagttagcatgacaactactttcagtacacaattaaataaagtaaatatactrcaagttttgacaagtaacttaaacctttatatttaaattgctattaaagattcatctctaagacaggaggagctttccctcatttgttcatatatccatg

SEQ ID NO: 20126 - DNA, 201 bp, Homo sapiens
gtcttcttgctgattttagatgatgggaaatgccccttgaatcctcacaggtaaggtagaaatgttttatgattgagtaaattttgctaccttaactttawaattcactgtaatatgtcagaatgattacatgcaatgcctgcctcctttttacaatgtcttttgcaatgtcttcttttctactctgaagtaaaatacaca

SEQ ID NO: 20127 - DNA, 201 bp, Homo sapiens
tttattgaaggcctattaagtgctaaactctaggctcagtgctaaggatccaaagctaaaaagaaaacaccgtcggagatttacaacctggcagatgtagmctgtatcatagaaacagacattaccgtacatggcaatgagcacaatggaggcagggatgaggtgctgtgggagcctggaggaaggaacacagagtccacc

SEQ ID NO: 20128 - DNA, 201 bp, Homo sapiens
ggccccacttcccattctgttgcagtggatttatgaattccagatcttctttcatgttagcttgtcagcattcccaggacctttggtgatcctacttgatygcacatcttagagttcttgaaaactttctgggagagaaagactagtcttttgcataatacacttcttatgtcttgcatgtgtgtgtgtttgttttgtagc

SEQ ID NO: 20129 - DNA, 201 bp, Homo sapiens
ctgttttgctgagaaagtacatacagtgggcaatgaggctggaccaactggtaggctccaggtcataaagcatgttattttccatgtgaagaggtagagcytgcccttaagacattttatatgtcatttaatctgagcttgggcaaattacttatgtctccttcttttataaaaggacaggagtaagttagatgacttcca

SEQ ID NO: 20130 - DNA, 201 bp, Homo sapiens
tccctgcacacctttgctaagccctcagaatggaacaatgacctgtgttcaacctcttggaagttccagttataaatccacatgtcaattcatctgtgacragggatattctttgtctggaccagaaagattggattgtactcgatcgggacgctggacagactccccaccaatgtgtgaaggtaggctgtgggtctgtcc

SEQ ID NO: 20131 - DNA, 201 bp, Homo sapiens
tgaagaggtagagcttgcccttaagacattttatatgtcatttaatctgagcttgggcaaattacttatgtctccttcttttataaaaggacaggagtaarttagatgacttccagggtccctcctaactttgatatcttatgattccaaacctttaacatcaaggatcctcagaagatgacattttcctattctgacatc

SEQ ID NO: 20132 - DNA, 201 bp, Homo sapiens
atcactaattaatacaactttacctgaacacagatgggttttatctccaccaacacagtactctaagcagccactaccattgattgtcgttttgccatctragatgtaaaggatgtagagaagcatcaattatccatgggagatgagaaatagatatatttactgtaatatgaaattaagtttgattgttggaataattct

SEQ ID NO: 20133 - DNA, 201 bp, Homo sapiens
tttacaggactaggtaacagtgtcaacaataagctatgctagtccagcttttttttttttccctataagtccagcattttcctgtatatactcttttcagrttcaatttcacagataatgtcaatatttaatgagcactttcaatgtacaaaacactctgctcagctccagaataaaactatgaatgactgagcccaactt

SEQ ID NO: 20134 - DNA, 201 bp, Homo sapiens
agataatgtcaatatttaatgagcactttcaatgtacaaaacactctgctcagctccagaataaaactatgaatgactgagcccaacttcgaggagaccayggtataatggggaagaatgacaatcatgtatgaacagcgcaagaacagaggctgtgggagcacattgcaggggcttctacccttagttaaggtgggaagg

SEQ ID NO: 20135 - DNA, 201 bp, Homo sapiens
gcttttagttctttatttactctgaactttctcctcttgttgctgggtgcacatcaagtgaaatacccaaatgtgggctgggcaggaaggtaccatgcagwgtgcaatccactcgctgttgtaatacttctgagagagtgttatcagacaatttccctttttaatgtcctcccacccctccacatctacccctgctgtcag

SEQ ID NO: 20136 - DNA, 201 bp, Homo sapiens
ttgctctttggcttagagacaacctcttttctcactgtatttctttttccacccctaagctgggctaccaatatctgtgccacaccactaacaccaccacygtccagaaacataagggaactaatgtattagctgtaatagcttgtaacatctgggctttgctaccaacaagttgtatagttctgcatcctcaacaactct

SEQ ID NO: 20137 - DNA, 201 bp, Homo sapiens
tggttcttaaatgctctgagtctgtaaaaaccagaggtcaaagcccagagcaaagaggtagtctttacactttgaaaagtttcagaaatagcctggaaatraaatgctttatcaaggaagagcatgaggaaaccaatctttatcagaactgaggtcactcagggcttaattgtgctcaggaattcactttggctgcactca

SEQ ID NO: 20138 - DNA, 201 bp, Homo sapiens
caccatgtagtctttgagggtagcctttgacaaagaagcaaaggaaggaacactgcatcgaaaaagtgtgtgatgcaatcccaggcaattacataattccrccaaaatgaattctctgcaattgcctcacaccctcagtttataaggcggacagtggtaatgggagaataggaaatttacgatagattagtgaattcccag

SEQ ID NO: 20139 - DNA, 201 bp, Homo sapiens
aaacctgtatccatttagctgctattgcctcctacatcttctctttatttgaacccttcccagtgtctcagtgcagcttcaccaaattcactggctgccayaggaacttcttcctatagaaccttgcatggtttatagaattttagtatctcagaattgagaggaaacatagagatcatgtagcacagcatatccacatat

SEQ ID NO: 20140 - DNA, 201 bp, Homo sapiens
ttctactaaaaatacaaaaaatagctgggcatggtggtgcatgcctgtagtcccagctactcgggaggctgaggcaggagaatcgcttgaacccaggaggyggaggttgcagtgagctgagattgtgccattgcactccagcctggtgacagagtgagactctgtctcaaaaaaaaattgcacagtttcaggaagtgcttt

SEQ ID NO: 20141 - DNA, 201 bp, Homo sapiens
gctttagttaaatattccacagtttcaagaacatcctggccaacatggtgaaaccccgtttctactaaaaatacaaaaaatagctgggcatggtggtgcaygcctgtagtcccagctactcgggaggctgaggcaggagaatcgcttgaacccaggaggtggaggttgcagtgagctgagattgtgccattgcactccagc

SEQ ID NO: 20142 - DNA, 201 bp, Homo sapiens
agataaaaaagttctccctctctttaaataatattttaatagctttagttaaatattccacagtttcaagaacatcctggccaacatggtgaaaccccgtytctactaaaaatacaaaaaatagctgggcatggtggtgcatgcctgtagtcccagctactcgggaggctgaggcaggagaatcgcttgaacccaggaggt

SEQ ID NO: 20143 - DNA, 201 bp, Homo sapiens
tgaagcatcatgaaattcaaacaatcacttttagccaaataccatcgttgtatattaatcacacacacacacacacacacacacacacacacacacacacmgagagagagagggagaaagagagagagagttacagagttcaggttgctgaattataaaatgatctcttcttttctcctctgccatgcccatgatagccat

SEQ ID NO: 20144 - DNA, 201 bp, Homo sapiens
aactggtgatgaagcatcatgaaattcaaacaatcacttttagccaaataccatcgttgtatattaatcacacacacacacacacacacacacacacacasacacacacagagagagagagggagaaagagagagagagttacagagttcaggttgctgaattataaaatgatctcttcttttctcctctgccatgcccat

SEQ ID NO: 20145 - DNA, 201 bp, Homo sapiens
ctaactggtgatgaagcatcatgaaattcaaacaatcacttttagccaaataccatcgttgtatattaatcacacacacacacacacacacacacacacasacacacacacagagagagagagggagaaagagagagagagttacagagttcaggttgctgaattataaaatgatctcttcttttctcctctgccatgccc

SEQ ID NO: 20146 - DNA, 201 bp, Homo sapiens
atagccttagatttaaagaaagaatagtcacttcatttgtctataacccaacatttattgataaataatagtcttatattagagaattaatggggagaaargaataatgctaagaaaatatgtaactgcaataatttgtaaaaatacttttggggggaaattgtgaattaaaatttaaattcatttattcattcacttggc

SEQ ID NO: 20147 - DNA, 201 bp, Homo sapiens
taaaaatcacctctaaagctgtttgtgattgagcacttcaggatgtcaatcaactgtaagctgctgctattttacacctctacaatctctaactggtgatraagcatcatgaaattcaaacaatcacttttagccaaataccatcgttgtatattaatcacacacacacacacacacacacacacacacacacacacacag

SEQ ID NO: 20148 - DNA, 201 bp, Homo sapiens
gacatgggacatgacagcacatcagttcagacaaaaagttgaagaattcagaggagaagagttcaggctgtggtgatcagcagagtcttcagagactttaygagttaaatcctggaggattagtgggattttacgccataaaagtggaaaaattctcaggggaatgtgagccaagaaccagaagcaataacacacaaagtc

SEQ ID NO: 20149 - DNA, 201 bp, Homo sapiens
aagccaaaattgacaaatgggatctaattaaactaaagagcttctgcacagcaaaagaaactaccatcagagtgaacaggcaacctacagaatgggagaayatttttgcaatctactcatctgacaaagggctaatatccagaatctacaatgaactcaaacaaatttacaagaaaaaaacaaacaaccccatcaaaaagt

SEQ ID NO: 20150 - DNA, 201 bp, Homo sapiens
atgggacatgacagcacatcagttcagacaaaaagttgaagaattcagaggagaagagttcaggctgtggtgatcagcagagtcttcagagactttacgarttaaatcctggaggattagtgggattttacgccataaaagtggaaaaattctcaggggaatgtgagccaagaaccagaagcaataacacacaaagtcact

SEQ ID NO: 20151 - DNA, 201 bp, Homo sapiens
cctgtgtaaattttgcttcaagttcagagagtggctttaattaacttttaggacctgagaaaatgaggataaggtttttctggtggggtattttcaatcasatagatctcagaggagtagctcttgattgggaacttatagttaaattgcactgatgtttgtcaaagttttagcgggctatggccgggctcagtggctcat

SEQ ID NO: 20152 - DNA, 201 bp, Homo sapiens
caataaaagccaaaattgacaaatgggatctaattaaactaaagagcttctgcacagcaaaagaaactaccatcagagtgaacaggcaacctacagaatgrgagaacatttttgcaatctactcatctgacaaagggctaatatccagaatctacaatgaactcaaacaaatttacaagaaaaaaacaaacaaccccatca

SEQ ID NO: 20153 - DNA, 201 bp, Homo sapiens
gggatcattcaaatggaagaaatagtttgagacagaaagcaatcattgcagtaaatttcaactttcacattgacctttagtcagagaacagtaccatttcycaataaggcagggttgggcaggcagttggcccatgtatatttggctttctgctgaatttcttatatttctgtaccatttcttgcttctttttaaaatagc

SEQ ID NO: 20154 - DNA, 201 bp, Homo sapiens
aagcaaaaacatcgacataaacaccaacctttagagacaaccacaggaggttcccagacctccatgtggatcccagggtaagaacccttctcgattgcctsctgggctttatgttcagaagcccctctcttggtaccctgaaattaggcttgagctctacagcgaagtgctaaggccccagccctggaatggtttttaata

SEQ ID NO: 20155 - DNA, 201 bp, Homo sapiens
ctcacaacaggcatagcatcacttcctactccaggggtgcaatgtccagccctcaccactcctgggcagggaaccatgtactgtaggcatcatccgggaamctttggttttaataccacttgttactttggctgcaacgctggattcacactcataggagacagcactctcagctgcagaccttcaggacaatggacagca

SEQ ID NO: 20156 - DNA, 201 bp, Homo sapiens
ataaccctgaagttccctgaaaatgtagtttaaggaggatgacagtctacttctttcaaacttccagtgtccagatatgctgaacacttattaagtatttyaataaacacatactgacatgccagttgatcacaaatgtagtaataacatttagactaacagtattttaagaaccaaaattttgtaaatagtatatttgga

SEQ ID NO: 20157 - DNA, 201 bp, Homo sapiens
gtgcaatgtccagccctcaccactcctgggcagggaaccatgtactgtaggcatcatccgggaacctttggttttaataccacttgttactttggctgcarcgctggattcacactcataggagacagcactctcagctgcagaccttcaggacaatggacagcagtaactccagcatgcagaggtaaggtgaaaaggagc

SEQ ID NO: 20158 - DNA, 201 bp, Homo sapiens
gcaagtactcaagctagccattgtgcctgtatgttgaagtctcacccaaccacaaccactactccaagtgtcatctcccttatgaaatccacaccaatccyattagaagtaatgtgtcacaggcatttcacttctgtccttcctcatgtcacaagctaaagctaatacacaagtactcagagacttaaaggaagaaacatt

SEQ ID NO: 20159 - DNA, 201 bp, Homo sapiens
acttccagtgtccagatatgctgaacacttattaagtatttcaataaacacatactgacatgccagttgatcacaaatgtagtaataacatttagactaayagtattttaagaaccaaaattttgtaaatagtatatttggaggcaagatttatcaatgcattagcaggtatttgtcggatgctactatgtgtccatcttt

SEQ ID NO: 20160 - DNA, 201 bp, Homo sapiens
ttcatttttgtatcccccacaaaacatagcacagtgctttgcaaatgtcactactgataaataacatttatttgaattaaatctaatttcttgacctttamtttcctatccataaattagaaagaataaccctgaagttccctgaaaatgtagtttaaggaggatgacagtctacttctttcaaacttccagtgtccagat

SEQ ID NO: 20161 - DNA, 201 bp, Homo sapiens
agagctactgtgaatattggaagtggctcatatcctttctgaccttttacattctgcctcatttattggcaatgttaggttacaaaagaaactataatctstttcacctccaatccacatgttgtttctcttgcattatttcttttctgcagctgtgaaatgctcagaactacatgttaataagccaatagcgatgaactg

SEQ ID NO: 20162 - DNA, 201 bp, Homo sapiens
ttttgtatcccccacaaaacatagcacagtgctttgcaaatgtcactactgataaataacatttatttgaattaaatctaatttcttgacctttaatttcytatccataaattagaaagaataaccctgaagttccctgaaaatgtagtttaaggaggatgacagtctacttctttcaaacttccagtgtccagatatgct

SEQ ID NO: 20163 - DNA, 201 bp, Homo sapiens
caaaaatcaatgagtacatgtgtattactgtttctttattccttacttcctcatcccttagctttgcagtgccaggatctcccagttccaaatgaggcccrggtgaactgctcccaccccttcggtgcctttaggtaccagtcagtctgcagcttcacctgcaatgaaggcttgctcctggtgggagcaagtgtgctacag

SEQ ID NO: 20164 - DNA, 201 bp, Homo sapiens
agggttggccactgtgatgggagactgggagcctcaccgactccttcgccctacacactcttgtgagctggccccaaagccagggaaatccctagaaatamtctgttcagggagaaaaccacttccacaggaagagtaccactaaatttaaaatcgttgcactccttctgcaatctgtctgaatagaggcaaagcccaggt

SEQ ID NO: 20165 - DNA, 201 bp, Homo sapiens
actgaattaattaattcatagctcctgtttagttgcaaaaggtgctattgttctaatgtattgttcagtgtagagttagtaataatgagaccagtgataatggtaataattattgcttaatgtaggactacctatttcataagcatcatcacattcaatccacacaaatgacccttaagttggttattactatgcccattt

SEQ ID NO: 20166 - DNA, 201 bp, Homo sapiens
ttacctcttacacctttctaagtggaaagctacaattttttatcccaaattttaaaagcaaaagaagattggattttccagtgtattacaaaaattagackgtaaaaataaaattgttacataatttcttaaagtttatccaatggaataaagtactagcatgatctgcaatcctcatcacttaaaagaccacaagcaggc

SEQ ID NO: 20167 - DNA, 201 bp, Homo sapiens
gtattgttcagtgtagagttagtaataatgagaccagtgataatggtaataattattgcttaatgtaggactacctatttcataagcatcatcacattcartccacacaaatgacccttaagttggttattactatgcccattttaaaggtgaagaaactgaggctttgagaggttaagtagctagcaaagttcatatagc

SEQ ID NO: 20168 - DNA, 201 bp, Homo sapiens
attcatctctaagacaggaggagctttccctcatttgttcatatatccatgaatgaatattacttatcaacaaaattagacaagtttggcatcaatattaytcccatatttcattttcaaggatttaaacattgagaaacttcattcatatgaataagtaaatggaattagaagttttattatagcaatgtctcaattcct

SEQ ID NO: 20169 - DNA, 201 bp, Homo sapiens
gcttaatgtaggactacctatttcataagcatcatcacattcaatccacacaaatgacccttaagttggttattactatgcccattttaaaggtgaagaarctgaggctttgagaggttaagtagctagcaaagttcatatagcttgaagtatggagacaggatgcaaacccaggcctagtctgattatagggctagtgtt

SEQ ID NO: 20170 - DNA, 201 bp, Homo sapiens
aagtaaatggaattagaagttttattatagcaatgtctcaattccttgaagtccttccaagttatatgccccaaattatatagtgatttactatcaaaatktagtcagacttgacaacttaatcgggtgctccctcaaagctgatgaaaggaaataaatggaaatcactagacttgaaaacggatttgctgcaatatcatt

SEQ ID NO: 20171 - DNA, 201 bp, Homo sapiens
cctgaacgaggaaacatgacctgccttcattctgcaaaagcattccagcatcagtctagctgcagcttcagttgtgaagagggatttgcattagttggacyggaagtggtgcaatgcacagcctcgggggtatggacagccccagccccagtgtgtaaaggtgagtttcaggtagttgggatgtataatgtccattgcacc

SEQ ID NO: 20172 - DNA, 201 bp, Homo sapiens
aaatggttcctcttattttcccatatgcctgaacccattaatttttaaccctcagcactgccccctagaaccccaattttcacatggtgttttgcagagtwctaggatacatcagatggactcaggggcctccaagtaagcagaggcagtgtggcaggtggagttctcaagctgtctcttcagagtgcaatgtgagatttc

SEQ ID NO: 20173 - DNA, 201 bp, Homo sapiens
agaattccacttcagcatttggaatggtgcattttgaaatgtgataggaagaacagcttgtgacacaacacaattcagagaaagcagtggggttaggttcrcaccaaagggttatcgatcactctgcattttgtgcaaataaacagctgtaaatcataacgttatgatactctcagtgtttaatcataggtcctgcagaga

SEQ ID NO: 20174 - DNA, 201 bp, Homo sapiens
cagcaaacatgacattgctgttaattctacatggaaaataaaaatcactattttgtctcctgcagtgagagagtgtggagaacttgagctccctcaacacrtgctcatgaactgcagccaccctctgggaaacttctcttttaactcgcagtgcagcttccactgcactgacgggtaccaagtaaatgggcccagcaagct

SEQ ID NO: 20175 - DNA, 201 bp, Homo sapiens
cttgcccttaagacattttatatgtcatttaatctgagcttgggcaaattacttatgtctccttcttttataaaaggacaggagtaagttagatgacttcyagggtccctcctaactttgatatcttatgattccaaacctttaacatcaaggatcctcagaagatgacattttcctattctgacatcattcacactttta

SEQ ID NO: 20176 - DNA, 201 bp, Homo sapiens
gagcaccttgaagaatataagatcagaattagagaaaactagctgcttaaaactagagggaaattttaatatcatccagctcacctgtctcatcttataamtgatgaaaaggacactcacgaggttttagtttctcaaggccgtggagcaggacagaagcaaagtgaggaccagaaaccagtctcccaaattttaggtgta

SEQ ID NO: 20177 - DNA, 201 bp, Homo sapiens
cttatatttctgtaccatttcttgcttctttttaaaatagcaacaacaatgactcctctgatttcttctcttggccaggagaatcatctcctcaaggatgmtttttaataattttcctcatctggttttctatctctgacactgatagtttttcttaacttccttaaatagctcttgcaggagcctcccttgttatgaagg

SEQ ID NO: 20178 - DNA, 201 bp, Homo sapiens
ggtcttgaagaggtttgtaaaaatcaaactatctaagtaaatgagacttatctgaccaaggtattgttgtcagaatagccttagatttaaagaaagaatartcacttcatttgtctataacccaacatttattgataaataatagtcttatattagagaattaatggggagaaaagaataatgctaagaaaatatgtaact

SEQ ID NO: 20179 - DNA, 201 bp, Homo sapiens
aaatacttttggggggaaattgtgaattaaaatttaaattcatttattcattcacttggcaagtggttactgagcactgcctcttgagatcctgggatggsagttatggaagactcaaggatgaatcattcttgggttttagacactttcccatccagtagaagagtgagggtatgacatgggacatgacagcacatcagt

SEQ ID NO: 20180 - DNA, 201 bp, Homo sapiens
ggaaatgaaatcctggattgcacccattcaagtaagatagagggagctgcggcaggctacgaggtctctgaagcagagggtgtagagaaaatagggtgacwttgtaagttcttgagtatggctgcctaaatctttgacttctttgtcttcgtgacttgtacctatactcttctctgtaagcttaccatcctcccactgccc

SEQ ID NO: 20181 - DNA, 201 bp, Homo sapiens
ccaaaaaggctctcaccaacgaggctgagaactgggctgataatgaacctaacaacaaaaggaacaacgaggactgcgtggagatatacatcaagagtccrtcagcccctggcaagtggaatgatgagcactgcttgaagaaaaagcacgcattgtgttacacaggtagggccttctctactttgaaactttcctgttaaa

SEQ ID NO: 20182 - DNA, 201 bp, Homo sapiens
gtagaaagtgttcttgaaacctcatgctgtttaagtcagtggctgaaaaatgaccctaggagcaaggacttcatgtctaaaacaccaaaagcaatggcaayaaaagccaaaattgacaaatgggatctaattaaactaaagagcttctgcacagcaaaagaaactaccatcagagtgaacaggcaacctacagaatgggag

SEQ ID NO: 20183 - DNA, 201 bp, Homo sapiens
gttccatcaggcactggtataaaaaattgtatccatattataatagttgttggtatgagaacattttaaaataatttcagacttttcatggttcacatttaaatatctttccttctacatgttccagccatcatacctttgagagaataattgagtaggagagtggtttatgtgcaggttttagaactagactaataagtg

SEQ ID NO: 20184 - DNA, 201 bp, Homo sapiens
aatctgaagactgtgctataatgagaataacagtattttgcatttgacaaatatgcagtgacatgtaccacctctttaagtcttctaaatcttagttcttmaggtgcctggtctcagacaaactcctggttgtctgttttggtttgttttatttctcactacaccaggttgccctcataggaggataaatatcattgtcat

SEQ ID NO: 20185 - DNA, 201 bp, Homo sapiens
agttccatcaggcactggtataaaaaattgtatccatattataatagttgttggtatgagaacattttaaaataatttcagacttttcatggttcacatttaaatatctttccttctacatgttccagccatcatacctttgagagaataattgagtaggagagtggtttatgtgcaggttttagaactagactaataagt

SEQ ID NO: 20186 - DNA, 201 bp, Homo sapiens
gagttccatcaggcactggtataaaaaattgtatccatattataatagttgttggtatgagaacattttaaaataatttcagacttttcatggttcacatttaaatatctttccttctacatgttccagccatcatacctttgagagaataattgagtaggagagtggtttatgtgcaggttttagaactagactaataag

SEQ ID NO: 20187 - DNA, 201 bp, Homo sapiens
agagttccatcaggcactggtataaaaaattgtatccatattataatagttgttggtatgagaacattttaaaataatttcagacttttcatggttcacatttaaatatctttccttctacatgttccagccatcatacctttgagagaataattgagtaggagagtggtttatgtgcaggttttagaactagactaataa

SEQ ID NO: 20188 - DNA, 201 bp, Homo sapiens
gaggaaaagggtgagagagtaggactaatggaaggtgttatagtccatgtcaatagtatcctagactgagttcagggtgaatatatggctaggacagaaasaaggcaagtaatccaaagatggattgacacatcaaagtagagcaaaatgagtatagggacccaagagtcttggaaaggcatgcatgaagacatttcaagt

SEQ ID NO: 20189 - DNA, 201 bp, Homo sapiens
tgatatctgtgtcttgaaactcattctggcccaatatggaatcacagaatgttacagtagcaaggagcaaagcatctggtctagatttttccttttaattstaaatacacaggagattaaataattttagcttagtttggtagcagaatcaggactagaatcccattctcccagtaaacaggccatgctccttccaccatt

SEQ ID NO: 20190 - DNA, 201 bp, Homo sapiens
aagcttgtttcatggagaatttaatattattcttttcttttagttatattctcatattttaaatatatgagttgcatatgaatgtgatgtcacaaaattasttctataatatatagccatctgctggtaagccagctctccaaataaaacacgttttctgccagacattgttcgttgtatctaagtgttgccaaattctct

SEQ ID NO: 20191 - DNA, 201 bp, Homo sapiens
gcttgaacccaggaggcggaggttgcagtgggtcctgagattgcatcactgcactccagcctaggagacagagcgagactccatctcaaaaaaaaaaagaaaaatgctccagtgatgtcccatttcacttagaagaaaattcaagttcttaccgtagcccatagggcctcccttgttctacacacctaccatccacctcat

SEQ ID NO: 20192 - DNA, 201 bp, Homo sapiens
gtaaaaatgcttgtaaggacatttcctttaataatgtatttaataagactgtcttagatcagggaataaagtatctgcaactgtaactaatcacttaaaarctgtcactaaagggtttcaatttgaggttaaattttcagaaactctgtaactagcatgcatcaaattgacttcaatgctgcacctttgagcaaagtttgt

SEQ ID NO: 20193 - DNA, 201 bp, Homo sapiens
tgcttgaacccaggaggcggaggttgcagtgggtcctgagattgcatcactgcactccagcctaggagacagagcgagactccatctcaaaaaaaaaaagaaaaatgctccagtgatgtcccatttcacttagaagaaaattcaagttcttaccgtagcccatagggcctcccttgttctacacacctaccatccacctca

SEQ ID NO: 20194 - DNA, 201 bp, Homo sapiens
ttgcttgaacccaggaggcggaggttgcagtgggtcctgagattgcatcactgcactccagcctaggagacagagcgagactccatctcaaaaaaaaaaagaaaaatgctccagtgatgtcccatttcacttagaagaaaattcaagttcttaccgtagcccatagggcctcccttgttctacacacctaccatccacctc

SEQ ID NO: 20195 - DNA, 201 bp, Homo sapiens
tttattggccttttaccccatcatgtaaaacatttcaggcttttttccccagatccttgttgtctgcctacatccacactgatgttctcaccttcttctcktaaagaatttatcaagttattgtaccaaacaaaaataactgcatcccaaagagaaattctgtcaccagctgatgatagggaatctttcacctaattaaat

SEQ ID NO: 20196 - DNA, 201 bp, Homo sapiens
gagtgcctattactagaatattaccaacttttagattggaaatattcaactctaagaactctgatgtgacaaaggcataatttgtagccataattgctttyattccggcccatggtctgattgcattgaaaacacatcagtcagatcaaaagcattcctgtcaattgggaaacctgtgtaaagcatccttcttcatgactt

SEQ ID NO: 20197 - DNA, 201 bp, Homo sapiens
catgaaaatctgatcgaggatttcaactcggggctgattgggcccctgcttatctgtaaaaaaggtaagaacacccccaccaaaagattcaacaactaaaygttggaatggtcaggagttctgtcatgggacaaagcttgggagcatcttggtaacttcttgtacatcaagcagaggaagacggcacggagaccagatcat

SEQ ID NO: 20198 - DNA, 201 bp, Homo sapiens
ttcatggtataaccttgtcactccatacttcattttacaatcttttaaaaaaatttgcactctctataatttgctcttagtctttgtgatataacaagggyctcaaagataaaatgctaatttttaatggtgtcatttcaaagttagaattcgggatcagaaatatgtgttttacttaacccccttccattcacatgaaat

SEQ ID NO: 20199 - DNA, 201 bp, Homo sapiens
aaactctcagtgtgatctagaccaagaatggttctgccaatcagagtgccgacagcatctctgtgaagaaagtgcctggattatatagacacatcacaacyctccaaggaagggctctaatttggaattacctccatcagcccattttcaataagacctacctgagattcaaactaggcctgactcttccaaagtcctcag

SEQ ID NO: 20200 - DNA, 201 bp, Homo sapiens; identical to SEQ ID NO: 5320

SEQ ID NO: 20201 - DNA, 201 bp, Homo sapiens
agaggtcaagctttaattattcaggctaaacaaataattgaacagcttgcatggacttttttcagtgggtttaactgacctaattatgtttttctcagggrtagggactattggcattagtttacatcctgagcccacaggcctagtataggattcagaaattatcaaactatccacaaatttgaagatttaaataaaatc

SEQ ID NO: 20202 - DNA, 201 bp, Homo sapiens
agcaataaatctaaggcttggctgatccaggccccacttggctgctgaagggctggaggtgggaagagggatcaataaataggtgcactagaaacctgccrtggcacacctgtcaggagttgcagtacttccctttgggtggagagaagccaccatgattcacaatggagaaagtagctgaaacctggaatcagtttcctg

SEQ ID NO: 20203 - DNA, 201 bp, Homo sapiens
ctctgcgtggtgaggaaaagggtgagagagtaggactaatggaaggtgttatagtccatgtcaatagtatcctagactgagttcagggtgaatatatggcyaggacagaaagaaggcaagtaatccaaagatggattgacacatcaaagtagagcaaaatgagtatagggacccaagagtcttggaaaggcatgcatgaag

SEQ ID NO: 20204 - DNA, 201 bp, Homo sapiens
ttttgagttaatttttgtatatgatgaatccagtttcattggattcattggggttcagtttcattcttccacatatgggtagccggctattccagcaccayttattaaatatgagtccttttccccttgttttttgttgttgttgttgctgttgttgttgactttgtcaaagttcaggtggttgtaagtgtgtggctttat

SEQ ID NO: 20205 - DNA, 201 bp, Homo sapiens
ctctttagacttgttcatggtataaccttgtcactccatacttcattttacaatcttttaaaaaaatttgcactctctataatttgctcttagtctttgtsatataacaagggcctcaaagataaaatgctaatttttaatggtgtcatttcaaagttagaattcgggatcagaaatatgtgttttacttaacccccttcc

SEQ ID NO: 20206 - DNA, 201 bp, Homo sapiens
gtagaatttttagttcttttcagtgacttaggctcctaggaaaacctttgtgaaacagaggttctactcaggtaaactctcagtgtgatctagaccaagartggttctgccaatcagagtgccgacagcatctctgtgaagaaagtgcctggattatatagacacatcacaactctccaaggaagggctctaatttggaat

SEQ ID NO: 20207 - DNA, 201 bp, Homo sapiens
tgtatttatttacagcttactcagtaatacaaaggatctgagacagtttctcaagttataaaggcataaaacaaggagtctatgtaattgggatagaataygcggacaaagaaaataaagccacagataagtagataccatgtgaccctgtaaggctgtcttcaaattttgtcctaagctttatggcagtcagtgtaaaaa

SEQ ID NO: 20208 - DNA, 201 bp, Homo sapiens
tgaaaagaagagctggtactatgaaaagaagtcccgaagttcttggagactcacatcctcagaaatgaaaaaatcccatgagtttcacggtattttcctcrgactttgatctaatctcctaattaaatcacactgggtcacagtgatttctgcccttagatattcacaagattagacatgagatgcttctgagacacccag

SEQ ID NO: 20209 - DNA, 201 bp, Homo sapiens
cgttgtttataagccactcaatccagggtactttgttaacagcaacccaaactaagaaaatcaccaatttctatcttactcacatgtgttaccagaactcragcacacttaagatctatcttatctaaagtagaacataaaggaaagaggctgtattaattgcaacatgactgggaaagaaaatacttaaccaaaatgtga

SEQ ID NO: 20210 - DNA, 201 bp, Homo sapiens
acagaagatggcatttatttgaaattttcttgaacaagtattagctatgttctgctctttctttatgaaaagaactgcaaagtcaagactcctttatctgwcattctgcaatgtatatatacttcaaaacaatatgtcatacacagtatatgcatacaattttatctgtcaattaaaaagagaaacaactcctccatttca

SEQ ID NO: 20211 - DNA, 201 bp, Homo sapiens
gaatcacttgaacccaggaggtggaggctgcagtgagctgacatcgcatcacttcactccaacctgggtgacagagcgaaactctatctcaaaaaaaaaamaacaacaacaacaacaacaaaaaagtatattgagaacctactacattctaggctctgggataaagtgaataagacatggaccttgatttccaggagccaa

SEQ ID NO: 20212 - DNA, 201 bp, Homo sapiens
ttgaatgattggccatgaattagaatgcctacatttacagaagatggcatttatttgaaattttcttgaacaagtattagctatgttctgctctttctttrtgaaaagaactgcaaagtcaagactcctttatctgacattctgcaatgtatatatacttcaaaacaatatgtcatacacagtatatgcatacaattttat

SEQ ID NO: 20213 - DNA, 201 bp, Homo sapiens
caggcaacatgtaacctttggggactggtattttttcactcagtataattctctggagattcatctggttattgcatgtattccattatatgggtgtaccmcagtttttttgttgttgttgttttatacacatttatggtgtaaacatgatgttttaatatatttataaattgtgaattggctaaatcaagctaattaacc

SEQ ID NO: 20214 - DNA, 201 bp, Homo sapiens
ccaaagctcttttgtaatctttcacagataatgcttcctgcttattagtggagactttctccataaactttttttcttttatagactagaattatgttatmacttacaggaagtgacttaagcttttatcatttctcagctcttgacagttttattatcaaagtgaaagtacagcctagagtaaatattagttattagtgt

SEQ ID NO: 20215 - DNA, 201 bp, Homo sapiens
atcccattatgctgatgttcagatcattgtaagcatagtagagttccatcaggcactggtataaaaaattgtatccatattataatagttgttggtatgakaacattttaaaataatttcagacttttcatggttcacatttaaatatctttccttctacatgttccagccatcatacctttgagagaataattgagtagg

SEQ ID NO: 20216 - DNA, 201 bp, Homo sapiens
gatggcaataatcataaagataatagtcatgcaagttattgtatcagccgctgaatagtaagtacctgatgttaatatggttctaattatcccattatgcygatgttcagatcattgtaagcatagtagagttccatcaggcactggtataaaaaattgtatccatattataatagttgttggtatgagaacattttaaaa

SEQ ID NO: 20217 - DNA, 201 bp, Homo sapiens
tgatcccttttatgtgctctcagcaagtgtagacataccttattaaaagttcaggatctggctatttgtctgtgcctctcaagcaagtagcttttcccccycaccaagggtcttactctgtcacccaggctggagtgcagtggtgtgatcatggctcactgcaacctccacttcctgggctcaggcgattctcgcacctca

SEQ ID NO: 20218 - DNA, 201 bp, Homo sapiens
aaacagtacaggaaagccttattatgattatcatcaccactgcaaacaaatgctggctgaactccatgagtgccgtgacttccttctcctgcttctaggaygcctaatggcgagaagccaatcccatgacacttgtggatggctcagaaatgacagtagttgatttctgtcacttgtctggaatggggcttttggtcatag

SEQ ID NO: 20219 - DNA, 201 bp, Homo sapiens; identical to SEQ ID NO: 5321

SEQ ID NO: 20220 - DNA, 201 bp, Homo sapiens; identical to SEQ ID NO: 5322

SEQ ID NO: 20221 - DNA, 201 bp, Homo sapiens; identical to SEQ ID NO: 5326

SEQ ID NO: 20222 - DNA, 201 bp, Homo sapiens; identical to SEQ ID NO: 5329

SEQ ID NO: 20223 - DNA, 201 bp, Homo sapiens; identical to SEQ ID NO: 5331

SEQ ID NO: 20224 - DNA, 201 bp, Homo sapiens; identical to SEQ ID NO: 5288

SEQ ID NO: 20225 - DNA, 201 bp, Homo sapiens
atatttaagtcagggccacacaaggtaggtaaaaatatctaattattgagtcagaaacataatccctaaccatggagttttactttattgtatatattttrtaagcaaaaattattcattttttttctgtttttcatagactgtaggatgccaatgggactaagcactggtatcatatctgattcacagatcaaggcttca

SEQ ID NO: 20226 - DNA, 201 bp, Homo sapiens
accactcgccctctctgtgtcaacagatttttaattgatttcaactctttgtcctttcagccattaatgggatgatctacagcttgcctggcctgaaaatrtatgagcaagagtgggtgaggttacacctgctgaacataggcggctcccaagacattcacgtggttcactttcacggccagaccttgctggaaaatggca

SEQ ID NO: 20227 - DNA, 201 bp, Homo sapiens
acttacagtgcttgaatgtattaagggaaacagtacaggaaagccttattatgattatcatcaccactgcaaacaaatgctggctgaactccatgagtgcygtgacttccttctcctgcttctaggacgcctaatggcgagaagccaatcccatgacacttgtggatggctcagaaatgacagtagttgatttctgtcact

SEQ ID NO: 20228 - DNA, 201 bp, Homo sapiens; identical to SEQ ID NO: 5303

SEQ ID NO: 20229 - DNA, 201 bp, Homo sapiens; identical to SEQ ID NO: 5305

SEQ ID NO: 20230 - DNA, 201 bp, Homo sapiens
aaaagatgaatttcttatattatgcttttcctccaagtggaattattagaatatctttaaaggcagagaatggagcacaaaatatttactatacatttgaygaatgactaaatcaatgtaaatggaaggctttatctttttcctgagatttctcctttggctaatttaggagaataatctctcatttgaaaattctgagtt

SEQ ID NO: 20231 - DNA, 201 bp, Homo sapiens
cagaaaattactctcagctttctttgcataacttccttttggcagtgaatctatcatagttctagaccagtgctgtccaatagaaactacgtatgagctayatgcgtaatttaaaattttctgatagcaacattaaaaagtaaagagaaataggtgacattaattttagtaatatgttttacttaactcagtatatcctga

SEQ ID NO: 20232 - DNA, 201 bp, Homo sapiens
gtgaggacagtggacccacccatgatgaccctccatgcctcacacacatctattactcccatgaaaatctgatcgaggatttcaactcggggctgattggscccctgcttatctgtaaaaaaggtaagaacacccccaccaaaagattcaacaactaaatgttggaatggtcaggagttctgtcatgggacaaagcttggg

SEQ ID NO: 20233 - DNA, 201 bp, Homo sapiens
tataatcagatatatttaagtcagggccacacaaggtaggtaaaaatatctaattattgagtcagaaacataatccctaaccatggagttttactttattrtatatattttctaagcaaaaattattcattttttttctgtttttcatagactgtaggatgccaatgggactaagcactggtatcatatctgattcacaga

SEQ ID NO: 20234 - DNA, 201 bp, Homo sapiens
attaatctgatgcctgacatctccacattagaactctgtttaaaacaccttttcctatgacttcctatttaaatgttgcactcaataccacatgagaacaactagctacctgagtatttctaagcaaggccccgagggagtgagatgcagggcctgtccagagtgaatagggatggaaccaccttcaaaatcttgtattcc

SEQ ID NO: 20235 - DNA, 201 bp, Homo sapiens
atagttaaagtcctgaatcttgggaaacccctcagaccagaacagtcggttaccttcttggttcccttcttggcctaatcctttagcaatccctgtgtttytgagttcacatccaccatctctaagctctgttgttacctgtataatgccatttatcacaatgagttgtcactgcttgtttgctggtcactcagatgtctg

SEQ ID NO: 20236 - DNA, 201 bp, Homo sapiens
acaaataagattgaataaaaaagcaatgctaaactgtatgcagaatttaagaaatccactttaatgagagagacaaagataggtaaaaaataaaggatagraaattatataccataccagctaacactaatccaacacaaaagggtgtgtaatgatgattccattgatatgacattacagaaaagccaaattatagtgaaa

SEQ ID NO: 20237 - DNA, 201 bp, Homo sapiens
gaacagagcatcagtgaactgtgggaccatatcaagtgatctaacatatgtgtaattggatcccagaagtagcaggaacagaaaaagtatttgaagaaatratgactgaaaaattcccaaatgtaatgtaaactacaaaccaacagattcaagatgtttgacaaaactaagaagaaggaacatgaagaaaaccacaccaag

SEQ ID NO: 20238 - DNA, 201 bp, Homo sapiens
tcatctcaagattcttaatcatagatacacagtcccttttgccatataaagtagcatatttccaggtcccagagattaggacgtggacatctcagcagggrcacattattctgcctactacacccaccaaacaaagccctcccacggtgtcctccatctcagagaatggcaccctcctccacccagctccccaaatcagaa

SEQ ID NO: 20239 - DNA, 201 bp, Homo sapiens
ctccagcctaggagacagagcgagactccatctcaaaaaaaaaaagaaaaatgctccagtgatgtcccatttcacttagaagaaaattcaagttcttaccrtagcccatagggcctcccttgttctacacacctaccatccacctcatctcttctttcttcccgtactgtttttcttactgttccttagatacatcaagac

SEQ ID NO: 20240 - DNA, 201 bp, Homo sapiens
tcctaactcagattctcctgcatccctctgataaggacctttgttattacatgggatccacctggacagcccagaagaatctcatctcaagattcttaatmatagatacacagtcccttttgccatataaagtagcatatttccaggtcccagagattaggacgtggacatctcagcaggggcacattattctgcctacta

SEQ ID NO: 20241 - DNA, 201 bp, Homo sapiens
acaggacagggattttcacagtgcttttctatacaatgtctgtaatctatagataacataaccgattaggtcacgggtcgatctttaactaccaggtccakggtgtggcgccgggctgtctgcttgtggatttcatttctgccttttagtttttacttcttctttctttggaggcagaaattgggcataagacaatatgag

SEQ ID NO: 20242 - DNA, 201 bp, Homo sapiens
caaccataatttcttctcttgagttatttcattgtctttctgtcctaactcagctgggatgcaggcttacattgacattaaaaactgcccaaagaaaaccrggaatcttaagaaaataactcgtgagcagaggcggcacatgaagaggtgggaatacttcattgctgcagaggaagtcatttgggactatgcacctgtaat

SEQ ID NO: 20243 - DNA, 201 bp, Homo sapiens; identical to SEQ ID NO: 5319

SEQ ID NO: 20244 - DNA, 201 bp, Homo sapiens
tgatggcaataatcataaagataatagtcatgcaagttattgtatcagccgctgaatagtaagtacctgatgttaatatggttctaattatcccattatgmtgatgttcagatcattgtaagcatagtagagttccatcaggcactggtataaaaaattgtatccatattataatagttgttggtatgagaacattttaaa

SEQ ID NO: 20245 - DNA, 201 bp, Homo sapiens
gacaataactgtactgtgtatcaagctctacttatggttttatcaggtctctcaaatgttacatttatttgaaatattagaagaaattgaactatttctgmtctttgacattaacagggggaaagagaagttgtgttttgtaaaacaggtgaaatagagagagaatgctatccaattatttcccagataaccctgcagcaa

SEQ ID NO: 20246 - DNA, 201 bp, Homo sapiens
atatttgactcatttttattaattctttaaatgacctgagatatcagaatggcatgaataacttgatgatcccttcagccaactaaatccaaattccctamtttctatcctcatatctccctcccttaagatacctacactccaatttcctggctttctatagaattccagggcctatccttaaattaggccactagaaag

SEQ ID NO: 20247 - DNA, 201 bp, Homo sapiens
agtttttgtattttatttccagtttgaatctttctgtaacttcctttaagaaaattgtctacagagagtatgaaccatattttaagaaagaaaaaccacartctaccatttcaggtaagcctgaaatatacttttttaattttaaagataaatttctatgggtaatttggcattcacatgcatctaaaatatccatttact

SEQ ID NO: 20248 - DNA, 201 bp, Homo sapiens
taggtcattgaaagttatatagtatttatctggaactgatgttaaaaaaaatagagagccaaaaattatagtagtcatcttgtctctgtaaaatgtaattmaataaatatgtcatgtacactgtatatacataagcaaacatgcaaataaaaaagcagcctactcaaaggttacaataatgttgcaacaattctggtagta

SEQ ID NO: 20249 - DNA, 201 bp, Homo sapiens; identical to SEQ ID NO: 5290

SEQ ID NO: 20250 - DNA, 201 bp, Homo sapiens
aattttaacagattttacactttcagctatcaatggctatgtgcctgagagcataactactcttggattctgctttgatgacactgtccagtggcacttcygtagtgtggggacccagaatgaaattttgaccatccacttcactgggcactcattcatctatggaaagaggcatgaggacaccttgaccctcttccccat

SEQ ID NO: 20251 - DNA, 201 bp, Homo sapiens
cttctcttgagttatttcattgtctttctgtcctaactcagctgggatgcaggcttacattgacattaaaaactgcccaaagaaaaccaggaatcttaagwaaataactcgtgagcagaggcggcacatgaagaggtgggaatacttcattgctgcagaggaagtcatttgggactatgcacctgtaataccagcgaatat

SEQ ID NO: 20252 - DNA, 201 bp, Homo sapiens
acccctgggtatggaaaatggaaagatagaaaacaagcaaatcacagcttcttcgtttaagaaatcttggtggggagattactgggaacccttccgtgccygtctgaatgcccagggacgtgtgaatgcctggcaagccaaggtcaagtatactctatgcatggtgttctcttagggctccagaagaaagcaaaggccctc

SEQ ID NO: 20253 - DNA, 201 bp, Homo sapiens
gagaaaagacgtatgataagactgaagagagaagtagaggtaaatcatacatggacttgtggtccacgttaaggactttatgcaagaagtaaatctagatrtacctactcaacttatggtttccatgctcagaacctcatgagatacattgcacgttactgtagtacctgaatccttcattgctattgaatggatgtgcct

SEQ ID NO: 20254 - DNA, 201 bp, Homo sapiens
cccctgggtatggaaaatggaaagatagaaaacaagcaaatcacagcttcttcgtttaagaaatcttggtggggagattactgggaacccttccgtgcccrtctgaatgcccagggacgtgtgaatgcctggcaagccaaggtcaagtatactctatgcatggtgttctcttagggctccagaagaaagcaaaggccctca

SEQ ID NO: 20255 - DNA, 201 bp, Homo sapiens
ctggaagaggggggtcagtcagtggagtccgacatgtcaggagtcaaaagaggtgtagacatctggactattctataaagatgggggcctgagcctgcccygtggaaggaatagggagagctttggctcaggagtccagagatctgagttctgatcccagcaatgctaccagatcactgactgaccttgggcaagtcacct

SEQ ID NO: 20256 - DNA, 201 bp, Homo sapiens
cagagggtagcagctggaagaggggggtcagtcagtggagtccgacatgtcaggagtcaaaagaggtgtagacatctggactattctataaagatgggggyctgagcctgccccgtggaaggaatagggagagctttggctcaggagtccagagatctgagttctgatcccagcaatgctaccagatcactgactgacctt

SEQ ID NO: 20257 - DNA, 201 bp, Homo sapiens
accccacaaaactttaaaaaatcattttatcatcaaacaaaatacccagatttctcagactggccaatggtatacggcagagtagaacatctggtcttgcrcctcaaggagctcatgctaaaaattggctaccaagacttttgattttactattgtagtttgttttgttctttatttcagtgtacctgaagtaaatagtag

SEQ ID NO: 20258 - DNA, 201 bp, Homo sapiens
agagtcttttccaggaaaaaccgatagctgggggtcattgatttctctacataaaaagcccagcctctctgcagggatttggcaaggatcagataccttastcttatgaccacgcgcccatttccaaaactctcctcagtcatcttttctgggtttgaccacacatgtagtatttcagccagattcacagggtcttatcag

SEQ ID NO: 20259 - DNA, 201 bp, Homo sapiens
tgtgaatggtaccccctacagttgtgcagcatgcagcctatgaaaccatacatgacaatcctatctatgaatcagtttttctctttatgcttttctctackacaatgtagtgaagcagctccatttggggtacatatatggtaaaggaaggaacactatggtaggagctaaaggcctgttagtgtgctcttaacactgcca

SEQ ID NO: 20260 - DNA, 201 bp, Homo sapiens
agcctgagaaccctagttatctaatctgagaagtgggcagaggagttgtcataccaataagagaataaacatgacttgctatggttgctggatacaccaaygataaactcctaattttataaactcctagacttcctaatttgcctgaaactttctctgaatttagaaggccttaaggtgacatgctgcatatctccttgc

SEQ ID NO: 20261 - DNA, 201 bp, Homo sapiens
ttcacaaggaaaatttgccctgtaagctagtaactgaaacagaaactgagaagagaaaggtacgagcttgtgttatgaatatgtagataggtgttctcacrcctgatataatttgaaggatgcccaaatgatctcaacccgtccctctccaaaaattcacctgcctggtttctgaaatttcacagcagttcctctaactta

SEQ ID NO: 20262 - DNA, 201 bp, Homo sapiens
ctcttagcctggtatcagaagttaaaaatgagataacagtacatagtgcatggtaagcacttggtaaatatttgttcaatgaatgaatttatatttaccakataagatagttgtcaggattaaatgggagattgcaggcaaatcatttaatatagtaatagattctcaataaatagtatcccttatattatcaatttatta

SEQ ID NO: 20263 - DNA, 201 bp, Homo sapiens
gggctgggaggagcttcatgggtctgactgctggggtgtgaagacttctcatatggcatttaagtcctttaccatctggccccaacctgctccttttctascctcatttctcaccaggttccacctgtccctgtgcatttcacagcccagttccaccgagatccttgctattccccaaactcttcctttactcccctgctc

SEQ ID NO: 20264 - DNA, 201 bp, Homo sapiens
tccatatgaattttagaatagctttgtctaatcctgaggaaaatgattccagtagttgttaaaaaatagtgttgaatctgtagattgctttgggcacaatrgctattttaacaatactgattcttccaatacataagcatagaatgtttttccatttgtttgtgtcatctatgatttctttcatcagtgttttgtaattct

SEQ ID NO: 20265 - DNA, 201 bp, Homo sapiens
acgataatttaacacaatatttaaaaaacttattctaagtaactcaggaatcaaaaaccagacactgtatgttctcacttacaaatgggagataaactgcrggtatgcgaaggcagacagattggtataatggacattggagactcaaaagggaacgggggatggatgaaaagctacctattgggtacagggtacactact

SEQ ID NO: 20266 - DNA, 201 bp, Homo sapiens; identical to SEQ ID NO: 5315

SEQ ID NO: 20267 - DNA, 201 bp, Homo sapiens
tgggtatggaaaatggaaagatagaaaacaagcaaatcacagcttcttcgtttaagaaatcttggtggggagattactgggaacccttccgtgcccgtctraatgcccagggacgtgtgaatgcctggcaagccaaggtcaagtatactctatgcatggtgttctcttagggctccagaagaaagcaaaggccctcactac

SEQ ID NO: 20268 - DNA, 201 bp, Homo sapiens
tcctatctatgaatcagtttttctctttatgcttttctctacgacaatgtagtgaagcagctccatttggggtacatatatggtaaaggaaggaacactayggtaggagctaaaggcctgttagtgtgctcttaacactgccacctcttctggtgtataatgatcccaaagagtcttttccaggaaaaaccgatagctggg

SEQ ID NO: 20269 - DNA, 201 bp, Homo sapiens
aggattacaggcatgagccactgcacctggccatggatggtacctaatgttgtaaaatagcataatttaagataaaagcagaagaaaatcagtttaaaaartgattacatttcaggatttcagttgctttcttctaggatgccactatatctattaaagcaccagtcttgttagtgcatttaccattttataatcagatat

SEQ ID NO: 20270 - DNA, 201 bp, Homo sapiens
ctcagaccacagagaaatcaaattagaactgaggactaagaaactcactcgaaaccacacaactacatggaaactgaacaacctgctcctgaatgactackgggtaaataatgaaattaaggcagaaataaataagttccttaaaaccaatgagaacaaagagacaacataccagaatctctaggagacagggctttgctt

SEQ ID NO: 20271 - DNA, 201 bp, Homo sapiens
ctcggcctcccagagtgctaggattacaggcatgagccactgcacctggccatggatggtacctaatgttgtaaaatagcataatttaagataaaagcagragaaaatcagtttaaaaaatgattacatttcaggatttcagttgctttcttctaggatgccactatatctattaaagcaccagtcttgttagtgcattta

SEQ ID NO: 20272 - DNA, 201 bp, Homo sapiens
gacaattctccttaaatgtcatgtcacttcaccaagatagataagaattggacagcagagaattaaaggttgcaatctttgacaaaatcctagagtgtagwtaatctacagacaaaggatgatccaaaggctttgacaatcaaccaaatagaagataggattaaggttctcttttgcagattaaagagcctaactaggact

SEQ ID NO: 20273 - DNA, 201 bp, Homo sapiens
gtgaatcttgctagagatttgtcgattttaaaaaaatcttcttggccgggcgcagtggctcacgtctgtaatcccagcactttgggaggccgaggtgggcrgatcacgaggtcaagagatcaagaccatcctgaccaacatggtgaaaccccctctctactaaaaatattaaaaaaaattaggcagggtggcgtgcacttg

SEQ ID NO: 20274 - DNA, 201 bp, Homo sapiens; identical to SEQ ID NO: 5317

SEQ ID NO: 20275 - DNA, 201 bp, Homo sapiens
atgtttgtagtgattttgcctgtttcatctctgatattgtcatctgcccctcctttcttttttgtgtgaatcttgctagagatttgtcgattttaaaaaaatcttcttggccgggcgcagtggctcacgtctgtaatcccagcactttgggaggccgaggtgggcagatcacgaggtcaagagatcaagaccatcctgacc

SEQ ID NO: 20276 - DNA, 201 bp, Homo sapiens
gaactttttttcatatttttatattttgtatttttattttttttgtagagaagaggttgcccaagatcaaactcctggcctcaagtaatcctcccccctcrgcctcccagagtgctaggattacaggcatgagccactgcacctggccatggatggtacctaatgttgtaaaatagcataatttaagataaaagcagaaga

SEQ ID NO: 20277 - DNA, 201 bp, Homo sapiens
tttttaattttaaagataaatttctatgggtaatttggcattcacatgcatctaaaatatccatttactgaaaatttatagaaacgtgtggttttttttttaagaagtactggctacataatatgtggggcccagtgcaaaatgaaaatgtgagtccccttgttcatattattgaaaatttcacagtgactgcaaagcatt

SEQ ID NO: 20278 - DNA, 201 bp, Homo sapiens
agaactttttttcatatttttatattttgtatttttattttttttgtagagaagaggttgcccaagatcaaactcctggcctcaagtaatcctcccccctyggcctcccagagtgctaggattacaggcatgagccactgcacctggccatggatggtacctaatgttgtaaaatagcataatttaagataaaagcagaag

SEQ ID NO: 20279 - DNA, 201 bp, Homo sapiens
atgaaaagaagagctggtactatgaaaagaagtcccgaagttcttggagactcacatcctcagaaatgaaaaaatcccatgagtttcacggtattttcctyggactttgatctaatctcctaattaaatcacactgggtcacagtgatttctgcccttagatattcacaagattagacatgagatgcttctgagacaccca

SEQ ID NO: 20280 - DNA, 201 bp, Homo sapiens
agtcacagcaatgtcaaattgctttagaaaaacaaaagtttactaaatatttcattctcatttttctctccttgtgttattttgacccagtaatcaatagktcacagacaagcagtggtccacagcccatacttgaatattcctgacgaaagtttattagaaattacctgccacaatggattattgtgttttcatgtcttt

SEQ ID NO: 20281 - DNA, 201 bp, Homo sapiens
atagtttgcaccaacctaacacatgctgcctgaggagttagtgaaggcagcccctcgacagcactttgggtgacgttgtgtgaatctgcctcagatgcagrcacagaagtccaaatggactggtttgattaagagcagggaaaaaaagagggttcttattggtttttcacatgccagtaactcactaatacatctagagag

SEQ ID NO: 20282 - DNA, 201 bp, Homo sapiens
tgattatcagaagagcaaggaaattcctgagaaagaggcaatacaatttactctgtttttccaggaaaaagatattcactcaggcttgataggtcccctcstaatctgccaaaaaggaatactacataaggacagcaacatgcctatggacatgagagaatttgtcttactatttatgacctttgatgaaaagaagagctg

SEQ ID NO: 20283 - DNA, 201 bp, Homo sapiens
agatgaacgcactggtcatgtgcttagagtcacagcaatgtcaaattgctttagaaaaacaaaagtttactaaatatttcattctcatttttctctccttrtgttattttgacccagtaatcaataggtcacagacaagcagtggtccacagcccatacttgaatattcctgacgaaagtttattagaaattacctgccac

SEQ ID NO: 20284 - DNA, 201 bp, Homo sapiens
gtgtgtcttcttttgaaaagtgtctgttcctgtccttggcctactttttaatggggctgtttgtttttttcttgtaaatttaagttccttataaatgctcsatattagacctttgccagatgcatagtttgcaaaaattttctcccattctgaatgttgtctgtttactctcttgatagtttcttttgctgtgcaggagct

SEQ ID NO: 20285 - DNA, 201 bp, Homo sapiens
gatcattccttttcctaggttcgttttaaaaatttagcatccagaccgtattctctacatgcccatggactttcctatgaaaaatcatcagagggaaagasttatgaagatgactctcctgaatggtttaaggaagataatgctgttcagccaaatagcagttatacctacgtatggcatgccactgagcgatcagggcca

SEQ ID NO: 20286 - DNA, 201 bp, Homo sapiens
caatgtatggtgtgacttatgcatatgagttcattaatctgatgcctgacatctccacattagaactctgtttaaaacaccttttcctatgacttcctatwtaaatgttgcactcaataccacatgagaacaactagctacctgagtatttctaagcaaggccccgagggagtgagatgcagggcctgtccagagtgaata

SEQ ID NO: 20287 - DNA, 201 bp, Homo sapiens
tgcgttaacttgcttagaataatggcctccagctccatccatgtccctgcaaaggacataatcttgttctttttgatggtcacatagtattctatggtgtwtatgtaccatattttcttcatccagtctgtcattgatgggcatttgggttgatttcatgtctttgctattgtgaagagtgcgaaaatgaacatacgcatg

SEQ ID NO: 20288 - DNA, 201 bp, Homo sapiens
ttagatttttgttaagcttaagtacatttgtggatcattccttttcctaggttcgttttaaaaatttagcatccagaccgtattctctacatgcccatggrctttcctatgaaaaatcatcagagggaaagacttatgaagatgactctcctgaatggtttaaggaagataatgctgttcagccaaatagcagttatacct

SEQ ID NO: 20289 - DNA, 201 bp, Homo sapiens; identical to SEQ ID NO: 5332

SEQ ID NO: 20290 - DNA, 201 bp, Homo sapiens; identical to SEQ ID NO: 5284

SEQ ID NO: 20291 - DNA, 201 bp, Homo sapiens
aaccataatttcttctcttgagttatttcattgtctttctgtcctaactcagctgggatgcaggcttacattgacattaaaaactgcccaaagaaaaccasgaatcttaagaaaataactcgtgagcagaggcggcacatgaagaggtgggaatacttcattgctgcagaggaagtcatttgggactatgcacctgtaata

SEQ ID NO: 20292 - DNA, 201 bp, Homo sapiens
ctgccaagtgggggtcaaagtccaggttccccactccattgccacctaagaagggattgttccttggtggctgggtgggaagggaagttccccatttggcmtccactgatactgcaggggcaggagcttcattaggggctggagatgaaagccctaaatccctacatggccttttctgacacaaccccagtgagggtgtag

SEQ ID NO: 20293 - DNA, 201 bp, Homo sapiens
cagagttactttgaccattaaaatagtaatatgcgccaagtgcctagcactcagtagacaccaacaatggtaactattggagactcaccaagaaatctttratgttccagcaatgcatgccatttcagagattcaaaattgtcctcgtgaattattacttagaaacatctaaatgtctcttatttgtggggatagagctca

SEQ ID NO: 20294 - DNA, 201 bp, Homo sapiens
tacacaagttacttggccacactgagccacaagtcatttatctggaaaacagtgtaatcacatctcacagagttactttgaccattaaaatagtaatatgygccaagtgcctagcactcagtagacaccaacaatggtaactattggagactcaccaagaaatctttgatgttccagcaatgcatgccatttcagagattc

SEQ ID NO: 20295 - DNA, 201 bp, Homo sapiens
agtcacttaagtgatttaagtaggtatttaaatatttgttaatgccagtcattatactggtactaaggctaagagtggtaatcgaggtagacatgagcccygcccttgtagaaatcatacctttggttttttactatgcttagtacataagtaaataaaaatattgcctacagcagtgtcccttttaacaataatgaaatg

SEQ ID NO: 20296 - DNA, 201 bp, Homo sapiens
catcatgtaaattattaaagtcacttaagtgatttaagtaggtatttaaatatttgttaatgccagtcattatactggtactaaggctaagagtggtaatsgaggtagacatgagccctgcccttgtagaaatcatacctttggttttttactatgcttagtacataagtaaataaaaatattgcctacagcagtgtccct

SEQ ID NO: 20297 - DNA, 201 bp, Homo sapiens
ccaaagatggattgacacatcaaagtagagcaaaatgagtatagggacccaagagtcttggaaaggcatgcatgaagacatttcaagtgatcagtaagatkttcagaacaaaaggaattccctgaatgagggttccggcatttgctgcagttctaaagttcagtggccaaaagcactgccatggcagtctgagagaaatgt

SEQ ID NO: 20298 - DNA, 201 bp, Homo sapiens
tcatagcaacatttttaagcaagaggtcaaaggctcacatccttagaaatgcgtttgatcttctattccaagcgtgtgtgtgtgtgtgtgtgtgtgtgtgkacacagacatactctgcgtggtgaggaaaagggtgagagagtaggactaatggaaggtgttatagtccatgtcaatagtatcctagactgagttcagggt

SEQ ID NO: 20299 - DNA, 201 bp, Homo sapiens
tcttggcctaatcctttagcaatccctgtgtttttgagttcacatccaccatctctaagctctgttgttacctgtataatgccatttatcacaatgagttrtcactgcttgtttgctggtcactcagatgtctgcttttgcagggcacaaactacaactggagtgtctgttccctcaaagctttatacaatgcctgacaca

SEQ ID NO: 20300 - DNA, 201 bp, Homo sapiens
catgacttgtgatccatggacaagtgcatataagaaattttccagcttccaagagttgaggagggaaaaggtcacaggaatttaacaatgactgagtcacyaaacttgacatttcagcatttaggaaacacagttttcatctgtccatctgttcatccattctttaagccattactaagcactgttgagtatgaagcactg

SEQ ID NO: 20301 - DNA, 201 bp, Homo sapiens; identical to SEQ ID NO: 5298

SEQ ID NO: 20302 - DNA, 201 bp, Homo sapiens
ataaccgattaggtcacgggtcgatctttaactaccaggtccagggtgtggcgccgggctgtctgcttgtggatttcatttctgccttttagtttttactwcttctttctttggaggcagaaattgggcataagacaatatgaggggtggtctcctcccttaaaatagtagttctgtttcaaattctttgagaaaccccca

SEQ ID NO: 20303 - DNA, 201 bp, Homo sapiens
aacaggacagggattttcacagtgcttttctatacaatgtctgtaatctatagataacataaccgattaggtcacgggtcgatctttaactaccaggtccrgggtgtggcgccgggctgtctgcttgtggatttcatttctgccttttagtttttacttcttctttctttggaggcagaaattgggcataagacaatatga

SEQ ID NO: 20304 - DNA, 201 bp, Homo sapiens
ccagtaattagaacagaacagaacaggacagggattttcacagtgcttttctatacaatgtctgtaatctatagataacataaccgattaggtcacgggtmgatctttaactaccaggtccagggtgtggcgccgggctgtctgcttgtggatttcatttctgccttttagtttttacttcttctttctttggaggcagaa

SEQ ID NO: 20305 - DNA, 201 bp, Homo sapiens
taatagaattgctaggtcaaattgtagcaggacaagccacagacaaaaacccctcagacaccaagttaaagaaggaagggctttattcagccgggagcttyggcaagactcatgtctccaacaaccgagctccccgagtgagcaattcctgtcccttttaagggctcacaactctaagagggtccacgtgagtgggtcgtg

SEQ ID NO: 20306 - DNA, 201 bp, Homo sapiens
agtagagacagggttttaccatgttggccaggctggtctcaaactcctgacctcgggcaatctgcctgcctcagcttcccaaagtgctgggattacaggcrtgagccattgcgcccggctgaacaatttattttcttttttggctatatacccagtaatagaattgctaggtcaaattgtagcaggacaagccacagacaa

SEQ ID NO: 20307 - DNA, 201 bp, Homo sapiens
gcctcagcctcccgagtagctgggattacaggcacccaccaccatgcccagctaatttttgtatttttagtagagacagggttttaccatgttggccaggstggtctcaaactcctgacctcgggcaatctgcctgcctcagcttcccaaagtgctgggattacaggcatgagccattgcgcccggctgaacaatttattt

SEQ ID NO: 20308 - DNA, 201 bp, Homo sapiens
cctgcctcagcctcccgagtagctgggattacaggcacccaccaccatgcccagctaatttttgtatttttagtagagacagggttttaccatgttggccrggctggtctcaaactcctgacctcgggcaatctgcctgcctcagcttcccaaagtgctgggattacaggcatgagccattgcgcccggctgaacaattta

SEQ ID NO: 20309 - DNA, 201 bp, Homo sapiens; identical to SEQ ID NO: 5304

SEQ ID NO: 20310 - DNA, 201 bp, Homo sapiens
ttcaagcaattctcctgcctcagcctcccgagtagctgggattacaggcacccaccaccatgcccagctaatttttgtatttttagtagagacagggtttyaccatgttggccaggctggtctcaaactcctgacctcgggcaatctgcctgcctcagcttcccaaagtgctgggattacaggcatgagccattgcgcccg

SEQ ID NO: 20311 - DNA, 201 bp, Homo sapiens
cccaggttcaagcaattctcctgcctcagcctcccgagtagctgggattacaggcacccaccaccatgcccagctaatttttgtatttttagtagagacarggttttaccatgttggccaggctggtctcaaactcctgacctcgggcaatctgcctgcctcagcttcccaaagtgctgggattacaggcatgagccattg

SEQ ID NO: 20312 - DNA, 201 bp, Homo sapiens; identical to SEQ ID NO: 5306

SEQ ID NO: 20313 - DNA, 201 bp, Homo sapiens
tcccaggttcaagcaattctcctgcctcagcctcccgagtagctgggattacaggcacccaccaccatgcccagctaatttttgtatttttagtagagacrgggttttaccatgttggccaggctggtctcaaactcctgacctcgggcaatctgcctgcctcagcttcccaaagtgctgggattacaggcatgagccatt

SEQ ID NO: 20314 - DNA, 201 bp, Homo sapiens
tttgtcttgtctatttttatcagtaccatcactgccgaaggcaagtctagagtgtgataacatattttgtcttagtttcaaattccaggtctgttggtatyggatgtgttgagcaagttgattagcctttcctaatttcttccttttatcaaatgggtaataaccctcctaaaaatgttacaggtctgtttgggggttcag

SEQ ID NO: 20315 - DNA, 201 bp, Homo sapiens; identical to SEQ ID NO: 5307

SEQ ID NO: 20316 - DNA, 201 bp, Homo sapiens
agtggcacttctgtagtgtggggacccagaatgaaattttgaccatccacttcactgggcactcattcatctatggaaagaggcatgaggacaccttgacmctcttccccatgcgtggagaatctgtgacggtcacaatggataatgttggtgagtaagagtctggacactcacagaggaagcttgctttgaatttctggt

SEQ ID NO: 20317 - DNA, 201 bp, Homo sapiens
ttccattttccaccttaatgtgtgagtgaaacactctctccaatgctcctgccaagtgatgaggggaggttactgctcagataaacagatctaattttccyactgtgtgtacacatgtatacacacacaccatccaaaaggtgaatatgcaaagctagtatcttatattatttgtcatgatcaaccttaaatcctagaata

SEQ ID NO: 20318 - DNA, 201 bp, Homo sapiens
atccttagaaatgcgtttgatcttctattccaagcgtgtgtgtgtgtgtgtgtgtgtgtgtgtacacagacatactctgcgtggtgaggaaaagggtgagrgagtaggactaatggaaggtgttatagtccatgtcaatagtatcctagactgagttcagggtgaatatatggctaggacagaaagaaggcaagtaatcca

SEQ ID NO: 20319 - DNA, 201 bp, Homo sapiens
cagcagacatcgaacagcaggctgtgtttgctgtgtttgatgagaacaaaagctggtaccttgaggacaacatcaacaagttttgtgaaaatcctgatgargtgaaacgtgatgaccccaagttttatgaatcaaacatcatgagcagtaagtcagagtactatttttgttcatcagtttttcattcctgtggttgaaata

SEQ ID NO: 20320 - DNA, 201 bp, Homo sapiens
tatttatttacagcttactcagtaatacaaaggatctgagacagtttctcaagttataaaggcataaaacaaggagtctatgtaattgggatagaatatgsggacaaagaaaataaagccacagataagtagataccatgtgaccctgtaaggctgtcttcaaattttgtcctaagctttatggcagtcagtgtaaaaaag

SEQ ID NO: 20321 - DNA, 201 bp, Homo sapiens
cacagatcagatagttgtaggtgcgcagccttatttctgagttctctattctgttccattggtctatgcgtctgttcttgtaccagtactatactgttttktcctccagagggcagcagacatcgaacagcaggctgtgtttgctgtgtttgatgagaacaaaagctggtaccttgaggacaacatcaacaagttttgtga

SEQ ID NO: 20322 - DNA, 201 bp, Homo sapiens
gatcagcaggaagattgcagtaaagatgaacagattaggagtaatcctcaacacacaaaaaaaaccagcatttcaaaaggtgacagaagagtaatattcartggcatctagaatattttctctttccatttgcatttgggcacttatgagaaggcaaaatcatagcaatcgttaagagaaaaaataactaattcccactta

SEQ ID NO: 20323 - DNA, 201 bp, Homo sapiens
agaatccagcccatctttcattaaaacaaacaaccacagtgagccacagcatgggaaataacgtgatggactcaccatctgcctatacatacacgctcagrccatacctacatacatgcccaatgtatttactcattatacaaagactttttttccatttcctggtatatataagatactgtgatggtactgaaaaaaacc

SEQ ID NO: 20324 - DNA, 201 bp, Homo sapiens
tttatcccatgagaatccagcccatctttcattaaaacaaacaaccacagtgagccacagcatgggaaataacgtgatggactcaccatctgcctatacayacacgctcaggccatacctacatacatgcccaatgtatttactcattatacaaagactttttttccatttcctggtatatataagatactgtgatggtac

SEQ ID NO: 20325 - DNA, 201 bp, Homo sapiens
ctatcagtagggaaagtccaatatacatggaggtgttaatgatgtgtctttgggtgcacaaagtacaaagtaagacatctaagtttcaggggatggacacrtttcatattcatacagacaaccagcctgcataggggagttagacgctgtggctcgggggaaaaaattgagataatcagatggctaagatgaaataaagag

SEQ ID NO: 20326 - DNA, 201 bp, Homo sapiens
gcatctcttctttcttgacttttcaatcatcgccattctgactggcatgagagggcatctcattgcgtttttctttctttttttgagacggagtctcgctstgtcgcccaggctggagtgcagtggcgcaatctctgctcactgcaagctccgcctcccaggctcacgccattctcctgcctcagcctcccgagtagctga

SEQ ID NO: 20327 - DNA, 201 bp, Homo sapiens
ttgcgtttttctttctttttttgagacggagtctcgctctgtcgcccaggctggagtgcagtggcgcaatctctgctcactgcaagctccgcctcccaggytcacgccattctcctgcctcagcctcccgagtagctgagactacaggggcccgccaacacaaatacaaaatacaaaaaatataattttttgtatttttag

SEQ ID NO: 20328 - DNA, 201 bp, Homo sapiens
cctctgcctcccaggttcaagcaattctcctgcctcagcctcccgagtagctgggattacaggcacccaccaccatgcccagctaatttttgtatttttartagagacagggttttaccatgttggccaggctggtctcaaactcctgacctcgggcaatctgcctgcctcagcttcccaaagtgctgggattacaggcat

SEQ ID NO: 20329 - DNA, 201 bp, Homo sapiens
caacctctgcctcccaggttcaagcaattctcctgcctcagcctcccgagtagctgggattacaggcacccaccaccatgcccagctaatttttgtatttytagtagagacagggttttaccatgttggccaggctggtctcaaactcctgacctcgggcaatctgcctgcctcagcttcccaaagtgctgggattacagg

SEQ ID NO: 20330 - DNA, 201 bp, Homo sapiens
atctcaactcactgcaacctctgcctcccaggttcaagcaattctcctgcctcagcctcccgagtagctgggattacaggcacccaccaccatgcccagcyaatttttgtatttttagtagagacagggttttaccatgttggccaggctggtctcaaactcctgacctcgggcaatctgcctgcctcagcttcccaaagt

SEQ ID NO: 20331 - DNA, 201 bp, Homo sapiens
atgatctcaactcactgcaacctctgcctcccaggttcaagcaattctcctgcctcagcctcccgagtagctgggattacaggcacccaccaccatgcccrgctaatttttgtatttttagtagagacagggttttaccatgttggccaggctggtctcaaactcctgacctcgggcaatctgcctgcctcagcttcccaa

SEQ ID NO: 20332 - DNA, 201 bp, Homo sapiens
gaggtatgatctcaactcactgcaacctctgcctcccaggttcaagcaattctcctgcctcagcctcccgagtagctgggattacaggcacccaccaccahgcccagctaatttttgtatttttagtagagacagggttttaccatgttggccaggctggtctcaaactcctgacctcgggcaatctgcctgcctcagctt

SEQ ID NO: 20333 - DNA, 201 bp, Homo sapiens
tacagaggtatgatctcaactcactgcaacctctgcctcccaggttcaagcaattctcctgcctcagcctcccgagtagctgggattacaggcacccaccrccatgcccagctaatttttgtatttttagtagagacagggttttaccatgttggccaggctggtctcaaactcctgacctcgggcaatctgcctgcctca

SEQ ID NO: 20334 - DNA, 201 bp, Homo sapiens
ttaacaagaccatactacagtgacgtggacatcatgagagacatcgcctctgggctaataggactacttctaatctgtaagagcagatccctggacaggcraggaatacaggtattttgtccttgaagtaacctttcagaaattctgagaatttcttctggctagaacatgttaggtctcctggctaaataatggggcatt

SEQ ID NO: 20335 - DNA, 201 bp, Homo sapiens
gagtacagaggtatgatctcaactcactgcaacctctgcctcccaggttcaagcaattctcctgcctcagcctcccgagtagctgggattacaggcacccrccaccatgcccagctaatttttgtatttttagtagagacagggttttaccatgttggccaggctggtctcaaactcctgacctcgggcaatctgcctgcc

SEQ ID NO: 20336 - DNA, 201 bp, Homo sapiens
ctcgtgatttgcccgcctcggcctcccaaagtgctgagagtacaggcgtgagccaccgcgcccggcctcattgtggttttgatttgcatttctctcatgawcactgatgttgagctttttaaaatgtgctttttggccgcatgtagttgcttttgcaaactaaggtaataaagagggcaggggaaaagtggttcatgtttc

SEQ ID NO: 20337 - DNA, 201 bp, Homo sapiens
aggctggagtacagaggtatgatctcaactcactgcaacctctgcctcccaggttcaagcaattctcctgcctcagcctcccgagtagctgggattacagscacccaccaccatgcccagctaatttttgtatttttagtagagacagggttttaccatgttggccaggctggtctcaaactcctgacctcgggcaatctg

SEQ ID NO: 20338 - DNA, 201 bp, Homo sapiens
acctatacttataagtggaacatcttagagtttgatgaacccacagaaaatgatgcccagtgcttaacaagaccatactacagtgacgtggacatcatgaragacatcgcctctgggctaataggactacttctaatctgtaagagcagatccctggacaggcgaggaatacaggtattttgtccttgaagtaacctttca

SEQ ID NO: 20339 - DNA, 201 bp, Homo sapiens
actctgtcgcccaggctggagtacagaggtatgatctcaactcactgcaacctctgcctcccaggttcaagcaattctcctgcctcagcctcccgagtagstgggattacaggcacccaccaccatgcccagctaatttttgtatttttagtagagacagggttttaccatgttggccaggctggtctcaaactcctgacc

SEQ ID NO: 20340 - DNA, 201 bp, Homo sapiens
cactctgtcgcccaggctggagtacagaggtatgatctcaactcactgcaacctctgcctcccaggttcaagcaattctcctgcctcagcctcccgagtarctgggattacaggcacccaccaccatgcccagctaatttttgtatttttagtagagacagggttttaccatgttggccaggctggtctcaaactcctgac

SEQ ID NO: 20341 - DNA, 201 bp, Homo sapiens
tcaaaaaaagaggatgcaaacactctgtatgtactaatacaaaaagttctccaagatatgttattaaattaaaaagctgggatgtagtatagcgtgtatayatagctgccttttgttaaaggagtgaaagggataagaatatttatattttcttatttgtaagacataaaggtattctggaattacacgcatgaaattaat

SEQ ID NO: 20342 - DNA, 201 bp, Homo sapiens
tatctaatggctacatgttatccaggttccaagtagaatatttaaagaattcaattgaacaatgagaacatttagacacaggatggggaacatcacacacyggggcctgtcggggggggggggtggggggcggggggagggatagcattaggagatatacctaatgttaatgacaagttaatgggtgcagcacaccaacat

SEQ ID NO: 20343 - DNA, 201 bp, Homo sapiens
ttgatttaactttgtagatcgtgttcaaaaatatggccagccgcccctatagcatttaccctcatggagtgaccttctcgccttatgaagatgaagtcaaytcttctttcacctcaggtttgaatctttcacttctactgaatccaactagtaacttctgagaggctgccacatttttctgctattctccttgcccggtgg

SEQ ID NO: 20344 - DNA, 201 bp, Homo sapiens
tttaataaattaggatacattcatacaatggaatactaagcatcaaaaaaagaggatgcaaacactctgtatgtactaatacaaaaagttctccaagataygttattaaattaaaaagctgggatgtagtatagcgtgtatacatagctgccttttgttaaaggagtgaaagggataagaatatttatattttcttatttg

SEQ ID NO: 20345 - DNA, 201 bp, Homo sapiens
ggaatagggaaggaagaagacaaagaaaggaagaaaggagaaaagaaaagaaactaggaaaggaaaaagaaaagaaagggaagagaaaggaaggggagggraaggattaatcatttcagttttcaaaaagtgtagttgcttcagtaagaggagttttattggccttttaccccatcatgtaaaacatttcaggcttttttc

SEQ ID NO: 20346 - DNA, 201 bp, Homo sapiens
tggaaatctaactatacagatacacttgttcacaggtgaaatgatgtatgtacaacatattcactgttgcaacgttagtagtagtaagactggaaacaacycaaaatgtccatcagtagaaaactagtttaataaattaggatacattcatacaatggaatactaagcatcaaaaaaagaggatgcaaacactctgtatgt

SEQ ID NO: 20347 - DNA, 201 bp, Homo sapiens
atccaacacaaaagggtgtgtaatgatgattccattgatatgacattacagaaaagccaaattatagtgaaataaagcagattagtggttgtctgggcccrgagggcattggctacaaatggcatgaagaaatgttttggaatgatggaactcttctctatcttgattggaactatagctataagactgggtaattgtttt

SEQ ID NO: 20348 - DNA, 201 bp, Homo sapiens
cagtcttgcttctcaatgcagaatcctttcttcccatgcactaactccctctttctcccttgccctttcaagccacctgcaccgcagacaaactttcctcrgttcctaacaaccaaacttagatattttgctcttagatttataacttgctctttggggatggagaaagcgaaggaattggcaaaggtttttttttttttt

SEQ ID NO: 20349 - DNA, 201 bp, Homo sapiens
gacttgtcattaaaacaatcaaaaagtaagtaaaaataacaattgaaaatcctcacatcatcttcacatcttcttcccttaggcagagcttcgaccactasagctagagagctgagaggattaagtgcttgaactcagccctattggcggttctggtgatttgactccctccagctgagatcagactggggtgaccaaaca

SEQ ID NO: 20350 - DNA, 201 bp, Homo sapiens
atataaagatggcagttttaaattcaaccatatcatcaattacattaaaagtaaatggaaagaacactacaattaagaaacaaataagattgaataaaaaagcaatgctaaactgtatgcagaatttaagaaatccactttaatgagagagacaaagataggtaaaaaataaaggatagaaaattatataccataccagct

SEQ ID NO: 20351 - DNA, 201 bp, Homo sapiens
acactgcattttaaggagagtgtgtaaccccaaagtgatttcgttgacttgtcattaaaacaatcaaaaagtaagtaaaaataacaattgaaaatcctcayatcatcttcacatcttcttcccttaggcagagcttcgaccactagagctagagagctgagaggattaagtgcttgaactcagccctattggcggttctgg

SEQ ID NO: 20352 - DNA, 201 bp, Homo sapiens
tcctttagatagaagaaatattatgtcagagagacatttagattcataagaaggaatgaaaagttccagaagttgataaatatagagaaattttttcctcrttttaatctattaaaaaggcaattgattatctaaatgttaaagcaaaatagtaacaatttattgtggggtatattatgtatatataaataaaatgtatga

SEQ ID NO: 20353 - DNA, 201 bp, Homo sapiens
cttccaccaaagcctcctagtgatgcaaggaatcctggctttgttgcaatggtctcctaaaaaaaacaagcctttgtgtgggtaaggaactgattctcagscccattatctagtatctagtgattatgtatctgagatgtaaaacagaaacctaaaagccaaggatggagtctccccacagagcaaatgagcattttccca

SEQ ID NO: 20354 - DNA, 201 bp, Homo sapiens
gcagaaagaatttctcactaacagagcagaaaaaaatgttaaaggaactcctttagatagaagaaatattatgtcagagagacatttagattcataagaargaatgaaaagttccagaagttgataaatatagagaaattttttcctcgttttaatctattaaaaaggcaattgattatctaaatgttaaagcaaaatagt

SEQ ID NO: 20355 - DNA, 201 bp, Homo sapiens
aagtatatggatgccaagaaaagcaaaaccatatgcacaaaaataaaaataaattgatctgagcttagagtttacgaatttatagttcccaaaagaataaytgggggtaaatgggacaaggtagggaaagaccatcagtagaaactaagaatagtaaacatttgtaaaaaccctctgccttataaagcagaataaattgaa

SEQ ID NO: 20356 - DNA, 201 bp, Homo sapiens
aggtacaattaaagaagggaagctgacattgctgtaatgtaaaaaaatattttatatggaaatttagcatctcagactttggcttcagaacataaggaacmagatttaccctttttctcaacaactagacaggcagacaaaacatataaaacagaagttttcagacatcgaatgacagacaactcaagacagtaaaagaag

SEQ ID NO: 20357 - DNA, 201 bp, Homo sapiens
aatacaatccagcacttttccttgaggaactcacacttgggtgaccaaaatgtgcaggacacaaatacttatgatctagtagaagaaaatgaattagtcayataatctcacaggcatttaattacaaattgtgatgggtgctgtaaaagaaaaaaatgtgtatcagaattggagataaaggtagaagtgaacagatattca

SEQ ID NO: 20358 - DNA, 201 bp, Homo sapiens
tgaacaaaattggtccagtaagaactgatcatcagaaagcagaaaagggcagctaagatccagatccaacaaaattctgtgcaggagtttggtcctgttgytaaccagatctccaggtttttgttttttaaagagaaaccagtaatccaaattcttatataatttctccggatgtttaatgttggcatttaatctatttta

SEQ ID NO: 20359 - DNA, 201 bp, Homo sapiens
ctcaatacacttggtgagtgaatgtttgatcacagagtacttgactgaatgcttattttggcctgtgtctctccctctttctcagatataacagtttgtgyccatgaccacatcagctggcatctgctgggaatgagctcggggccagaattattctccattcatttcaacggccaggtcctggagcagaaccatcataag

SEQ ID NO: 20360 - DNA, 201 bp, Homo sapiens
cttaacaagaccatactacagtgacgtggacatcatgagagacatcgcctctgggctaataggactacttctaatctgtaagagcagatccctggacaggygaggaatacaggtattttgtccttgaagtaacctttcagaaattctgagaatttcttctggctagaacatgttaggtctcctggctaaataatggggcat

SEQ ID NO: 20361 - DNA, 201 bp, Homo sapiens
gataatgctgttcagccaaatagcagttatacctacgtatggcatgccactgagcgatcagggccagaaagtcctggctctgcctgtcgggcttgggcctrctactcagctgtgaacccagtaggtactttcattgaaagtttttctcattcccctaacctcgtaatctgaagtccaccaaatggaagagtcggggttatt

SEQ ID NO: 20362 - DNA, 201 bp, Homo sapiens
catattttaaatatatgagttgcatatgaatgtgatgtcacaaaattagttctataatatatagccatctgctggtaagccagctctccaaataaaacacrttttctgccagacattgttcgttgtatctaagtgttgccaaattctctatacaaaaatttgctcttctagatttttccaaaacattccaatgcttgactt

SEQ ID NO: 20363 - DNA, 201 bp, Homo sapiens
ctttaaaaagcttgtttcatggagaatttaatattattcttttcttttagttatattctcatattttaaatatatgagttgcatatgaatgtgatgtcacmaaattagttctataatatatagccatctgctggtaagccagctctccaaataaaacacgttttctgccagacattgttcgttgtatctaagtgttgccaa

SEQ ID NO: 20364 - DNA, 201 bp, Homo sapiens
tgattcacatggtgagtacacagggaaccatgactggtcattctgtcccctcatcctgtgggtaagtttccaaagttctggagattcgttcctctggtagsaattgttgagtcaaaaccatagaaacacaacccagacaaactgtcatattgtttaaccctaaatcatatcatttctctctagcattttcttatgaaaaat

SEQ ID NO: 20365 - DNA, 201 bp, Homo sapiens
gagtctcactctgtcgcccaggctggagtacagaggtatgatctcaactcactgcaacctctgcctcccaggttcaagcaattctcctgcctcagcctccygagtagctgggattacaggcacccaccaccatgcccagctaatttttgtatttttagtagagacagggttttaccatgttggccaggctggtctcaaact

SEQ ID NO: 20366 - DNA, 201 bp, Homo sapiens
ttgctactgtgaataatgctgtgatgaacatcctagtacatgtgtcttttcagtagaacaatgtattttctgtctttctttcttttttttttttttgagayggagtctcactctgtcgcccaggctggagtacagaggtatgatctcaactcactgcaacctctgcctcccaggttcaagcaattctcctgcctcagcctc

SEQ ID NO: 20367 - DNA, 201 bp, Homo sapiens
atagtacccaatagtttttcatcccttgctcatctccttccttcccccttctagaagtccccagtgtttattgccatctttatgttcatgagtacccaatrtttagctcccacttataagtgagaacatgtggtatttggctttctgtttctgcattaattcacttagcataatagcctccagctggcatccatgttgttg

SEQ ID NO: 20368 - DNA, 201 bp, Homo sapiens
actaaaataaggactgaactttgtgacctccacagtcctgtgtaaagctaacataaaaacaaacaaaaagcttcaggcacaagatcagaataaactccagsagtaggagttcaaggaaaggaataggacaaccgtgggtggcaagacaggggtagggaaagataggacctctgtcccagaaatcagagtttaccattgctt

SEQ ID NO: 20369 - DNA, 201 bp, Homo sapiens
ggagttttagaccagcctgggcaatgtagtgagactctgtttctatttaaaaaaatacatacatatatatatatatatatatatatatatatatatatatttaaattagccagacatggtggtacatacctgtcatttcagctactggggaggctaaggcaagagggtcatttaggacaagagcatcacttgagcccagga

SEQ ID NO: 20370 - DNA, 201 bp, Homo sapiens
gagactcaaaagggaacgggggatggatgaaaagctacctattgggtacagggtacactactcaggtgacaggtacactaaaatcctagacttcaccactmtacaattcatccatgtaaccaaaaaccacttgcattcctaaagcaactgaagttttttaaaaaatttaaaaatcaaaattaatgcacgaaagccacaata

SEQ ID NO: 20371 - DNA, 201 bp, Homo sapiens
aggagttttagaccagcctgggcaatgtagtgagactctgtttctatttaaaaaaatacatacatatatatatatatatatatatatatatatatatatatttaaattagccagacatggtggtacatacctgtcatttcagctactggggaggctaaggcaagagggtcatttaggacaagagcatcacttgagcccagg

SEQ ID NO: 20372 - DNA, 201 bp, Homo sapiens
caggagttttagaccagcctgggcaatgtagtgagactctgtttctatttaaaaaaatacatacatatatatatatatatatatatatatatatatatatatttaaattagccagacatggtggtacatacctgtcatttcagctactggggaggctaaggcaagagggtcatttaggacaagagcatcacttgagcccag

SEQ ID NO: 20373 - DNA, 201 bp, Homo sapiens
aataaatctaaggcttggctgatccaggccccacttggctgctgaagggctggaggtgggaagagggatcaataaataggtgcactagaaacctgccatgrcacacctgtcaggagttgcagtacttccctttgggtggagagaagccaccatgattcacaatggagaaagtagctgaaacctggaatcagtttcctgttg

SEQ ID NO: 20374 - DNA, 201 bp, Homo sapiens
agtaatattcagtggcatctagaatattttctctttccatttgcatttgggcacttatgagaaggcaaaatcatagcaatcgttaagagaaaaaataactrattcccacttagaccacatctcttctatttctctctggtagaactgacctacaactaaagatccagggtatatgatactagcctgagggaaaaacattaa

SEQ ID NO: 20375 - DNA, 201 bp, Homo sapiens
gccaggagttttagaccagcctgggcaatgtagtgagactctgtttctatttaaaaaaatacatacatatatatatatatatatatatatatatatatatatatttaaattagccagacatggtggtacatacctgtcatttcagctactggggaggctaaggcaagagggtcatttaggacaagagcatcacttgagccc

SEQ ID NO: 20376 - DNA, 201 bp, Homo sapiens
aactaggcacaatggctgacctcatggcacttatacccagtgagagacagatattaatagataatctcacaaataaattatatataatctacaatatataytctagagatattataagaatactacaggaatttactatatatactataataatactatagaaatatgagaaattgatatagagacttgacctagtctaaa

SEQ ID NO: 20377 - DNA, 201 bp, Homo sapiens
caaggtgggaggattgcttgaggccaggagttttagaccagcctgggcaatgtagtgagactctgtttctatttaaaaaaatacatacatatatatatatrtatatatatatatatatatatatatttaaattagccagacatggtggtacatacctgtcatttcagctactggggaggctaaggcaagagggtcatttag

SEQ ID NO: 20378 - DNA, 201 bp, Homo sapiens
cttcttggactcttaaagcagtgctttccaatattttttacttcaaagcacacaaagaaaataatatctgcctggcattctgaggtaaaagaatgaagcawtaaatctaaggcttggctgatccaggccccacttggctgctgaagggctggaggtgggaagagggatcaataaataggtgcactagaaacctgccatggc

SEQ ID NO: 20379 - DNA, 201 bp, Homo sapiens
ttttaatttttaaaggaacctcccatactgttttccataatggctgtactaatttacactctcaccaagagtatacaagagttcccttttcttcacatccwtgccaacatttatctcttgtcatttttataatagccatcctaacggtgtgaggtgagccctcattgtgattttaaattgcatttctctgattattagtaa

SEQ ID NO: 20380 - DNA, 201 bp, Homo sapiens
ctactatttgctgtgtttgatgaaagcaagagctggagccagtcatcatccctaatgtacacagtcaatggatatgtgaatgggacaatgccaggtaacaygagggctgtgtaccattaaacaacagtaaaatcattagtaatttttcggtcctgttttcttcaaagcactagagaagttgaccatactcactgttttgca

SEQ ID NO: 20381 - DNA, 201 bp, Homo sapiens
gacagaaagaaggcaagtaatccaaagatggattgacacatcaaagtagagcaaaatgagtatagggacccaagagtcttggaaaggcatgcatgaagacrtttcaagtgatcagtaagattttcagaacaaaaggaattccctgaatgagggttccggcatttgctgcagttctaaagttcagtggccaaaagcactgcc

SEQ ID NO: 20382 - DNA, 201 bp, Homo sapiens
aatggagtatcagtgaggacagtggacccacccatgatgaccctccatgcctcacacacatctattactcccatgaaaatctgatcgaggatttcaactckgggctgattgggcccctgcttatctgtaaaaaaggtaagaacacccccaccaaaagattcaacaactaaatgttggaatggtcaggagttctgtcatggg

SEQ ID NO: 20383 - DNA, 201 bp, Homo sapiens
gatttgagagtggtgaaaacgcaatcctcagaaactgcccacatgtcttgatggctgttactcctccaggtgcttcttaccttgaccacacattccctgcrgagaagatggacgacgctgtggctccaggccgagaatacacctatgaatggagtatcagtgaggacagtggacccacccatgatgaccctccatgcctca

SEQ ID NO: 20384 - DNA, 201 bp, Homo sapiens
tctctcaccccaaaacatttgcaaggcaagaaactctcctgacagtcttgcttctcaatgcagaatcctttcttcccatgcactaactccctctttctccyttgccctttcaagccacctgcaccgcagacaaactttcctcagttcctaacaaccaaacttagatattttgctcttagatttataacttgctctttgggg

SEQ ID NO: 20385 - DNA, 201 bp, Homo sapiens
tcccaaagagaaattctgtcaccagctgatgatagggaatctttcacctaattaaatgaggaattcctcaggcagaggaaactgttcattccacttggctmtctatggcactcacctctccccttcctgacctcacttgctccattttattattgaaaacctcacccaaccctctacacttcttttaatattgagtatctc

SEQ ID NO: 20386 - DNA, 201 bp, Homo sapiens
cagttggaaagaagatctgaaatagcaaaacaaaataatacataaacagctctgactatcctcccatctcatgttaataggctaagtatgtcttattaaasaccacaaagaagatatcacccattcttatattctgagatggtttactaatcaaaggcgattcaattctctgattatatttaaataataattgttcaggta

SEQ ID NO: 20387 - DNA, 201 bp, Homo sapiens
agacacaacaaagtccactttatgctagcgcaaagttcacaaactcagatgcctatagtagccagataagtagttcagtgaacaaaattggtccagtaagdactgatcatcagaaagcagaaaagggcagctaagatccagatccaacaaaattctgtgcaggagtttggtcctgttgttaaccagatctccaggtttttg

SEQ ID NO: 20388 - DNA, 201 bp, Homo sapiens
caaagtgaaagtacagcctagagtaaatattagttattagtgtcaagctatcctttggggtgtgttgggggaagacacaacaaagtccactttatgctagygcaaagttcacaaactcagatgcctatagtagccagataagtagttcagtgaacaaaattggtccagtaagaactgatcatcagaaagcagaaaagggca

SEQ ID NO: 20389 - DNA, 201 bp, Homo sapiens; identical to SEQ ID NO: 5314

SEQ ID NO: 20390 - DNA, 201 bp, Homo sapiens
tttgattacaaagtcaaaatcacattcaccaaaactgcatctcacaaatgcttcctcttaatagctgtttgtattttatactttatattaatgtatgttgyaaaatcaaagatacaacaaacctgttttattctagactaaaggtaaaataatttgaagtgaaaagaataaaagcattgataaaattacaccccaattgtc

SEQ ID NO: 20391 - DNA, 201 bp, Homo sapiens
aacaaaatccttttgagctctgtgcttttttgcataacttggtctaaaaaaaaagcaaaggttttaacatcttccttatctatgtgtttttgtcattttcrtaggcaaacaacaataagcagtggctagaaattgatctactcaagatcaagaagataacggcaattataacacagggctgcaagtctctgtcctctgaaa

SEQ ID NO: 20392 - DNA, 201 bp, Homo sapiens
ccatacctacatacatgcccaatgtatttactcattatacaaagactttttttccatttcctggtatatataagatactgtgatggtactgaaaaaaaccktaaaacttacaaaagactcttcttgcattttaccatcagcagcatgtttttctcatagtgagaatggattaatgctgatacttccacccaattatctaat

SEQ ID NO: 20393 - DNA, 201 bp, Homo sapiens
tctcttcttttcagtttagagcttaattttttttattttgattacaaagtcaaaatcacattcaccaaaactgcatctcacaaatgcttcctcttaatagytgtttgtattttatactttatattaatgtatgttgtaaaatcaaagatacaacaaacctgttttattctagactaaaggtaaaataatttgaagtgaaaa

SEQ ID NO: 20394 - DNA, 201 bp, Homo sapiens
ttgtggttattgtttttgtcatttgttggtagtaatattatttcttatctcctctgcagtgcatgaagccatgcagggaatattggtgtgtaattaatcamgttacttttcttttgataggatgttccacacccctgggtatggaaaatggaaagatagaaaacaagcaaatcacagcttcttcgtttaagaaatcttggt

SEQ ID NO: 20395 - DNA, 201 bp, Homo sapiens
gcagctgaacaaggacttcttgtgctctagcacaatagttgtccctgtccatttctcttcttttcagtttagagcttaattttttttattttgattacaaagtcaaaatcacattcaccaaaactgcatctcacaaatgcttcctcttaatagctgtttgtattttatactttatattaatgtatgttgtaaaatcaaaga

SEQ ID NO: 20396 - DNA, 201 bp, Homo sapiens
aacggctatagtttgtatatttaataaatcacaaaaatgtggatcccttttccaaagagacttgcaagtcctgtgcaatgaaatcagctctttataaaacrtcagcattgattcgcccattgcctacattatagcttctaaaagaatattctgaatctttgaatgtagtgaagcattcactaagtttattaacttaggaga

SEQ ID NO: 20397 - DNA, 201 bp, Homo sapiens
ggcaagaggattacttgagaggagtttaaggctgcagtgagccatgactgtgccactggactcaagcctgggcaacagaataagaccctgtctaaaaaaamacaaaaacaaaaaaccttagccatttatgttgtcattaaagattttctcttatttggctttcagatttttgaaggaaatactaataccaaaggacatgtg

SEQ ID NO: 20398 - DNA, 201 bp, Homo sapiens
gacctacctgagattcaaactaggcctgactcttccaaagtcctcaggtcactcaaacttcaatgtcatgacagtatctggcaacatcactgccatatatrtggtgttcaatgagtgtttttgaaatctgaattggcttcccaacttcctgaaaccacaattcttctttatattttctttcataccctgtgtaggtactca

SEQ ID NO: 20399 - DNA, 201 bp, Homo sapiens
gggtcatttttaggaattctgtcttgggctttaaaatggctagtcttggctgggcatagtggctcatgactgtaatcccagcactttgggaggccaaggtrggaggattgcttgaggccaggagttttagaccagcctgggcaatgtagtgagactctgtttctatttaaaaaaatacatacatatatatatatatatata

SEQ ID NO: 20400 - DNA, 201 bp, Homo sapiens
ataaaaatccctctcattacccctttatagtcacatctgccttcctcccaccatagcccttccttattccctggcaaccagtagtctgatctccatttctrtaattttgtcatttcaagaatattacataaatggaatcaggcaacatgtaacctttggggactggtattttttcactcagtataattctctggagattca

SEQ ID NO: 20401 - DNA, 201 bp, Homo sapiens
agctggggtcatttttaggaattctgtcttgggctttaaaatggctagtcttggctgggcatagtggctcatgactgtaatcccagcactttgggaggccraggtgggaggattgcttgaggccaggagttttagaccagcctgggcaatgtagtgagactctgtttctatttaaaaaaatacatacatatatatatatat

SEQ ID NO: 20402 - DNA, 201 bp, Homo sapiens
ccgagggagtgagatgcagggcctgtccagagtgaatagggatggaaccaccttcaaaatcttgtattccattcaaggctcacaacccacttttatggcaktcggagttgctttacccactcccttgtgttctgtgagtttgcatgttatgctcagagtctggaaagatgggattagtaggggaggtagaccagaagaaag

SEQ ID NO: 20403 - DNA, 201 bp, Homo sapiens
gtacagctggggtcatttttaggaattctgtcttgggctttaaaatggctagtcttggctgggcatagtggctcatgactgtaatcccagcactttgggakgccaaggtgggaggattgcttgaggccaggagttttagaccagcctgggcaatgtagtgagactctgtttctatttaaaaaaatacatacatatatatat

SEQ ID NO: 20404 - DNA, 201 bp, Homo sapiens
ttaatctgatgcctgacatctccacattagaactctgtttaaaacaccttttcctatgacttcctatttaaatgttgcactcaataccacatgagaacaactagctacctgagtatttctaagcaaggccccgagggagtgagatgcagggcctgtccagagtgaatagggatggaaccaccttcaaaatcttgtattcca

SEQ ID NO: 20405 - DNA, 201 bp, Homo sapiens
gatgtagaaatctcctttttgcatttacttgtttagatcagaatttctaagagatccaaatcccttttttaaaagaatatttacaattcagttttgcttasgggtagaaagccatgttgaactgggctctttgttctgggatgaagatacagaaagagaagagagaggaggaaaggagcaaggcttagtcaactacaaatt

SEQ ID NO: 20406 - DNA, 201 bp, Homo sapiens
cattaatctgatgcctgacatctccacattagaactctgtttaaaacaccttttcctatgacttcctatttaaatgttgcactcaataccacatgagaacaactagctacctgagtatttctaagcaaggccccgagggagtgagatgcagggcctgtccagagtgaatagggatggaaccaccttcaaaatcttgtattc

SEQ ID NO: 20407 - DNA, 201 bp, Homo sapiens
tcagtgacttttatgaagttatttaacctctgtgtgcctcatctttctcatctgtaaaatggtaataataatcatgtctctgtcatacaggtttgttgtcrtgaaatcttagaataatgactggcatataacagataataaatattagccatgatagtaaagataattcttcaattaaaatgtgttcaaataatttagtat

SEQ ID NO: 20408 - DNA, 201 bp, Homo sapiens
ctgccccttcctttcacatactaagctccacctccccactggataactgtcagttctctaaaaaggccacattttctggcacctcagggcctttgcgcacrctactctaactttttagaatgtctttggccatcccttttcctctctgcctttggacctcagttaaaggattaattcctcgggaagggattccccaactca

SEQ ID NO: 20409 - DNA, 201 bp, Homo sapiens; identical to SEQ ID NO: 5324

SEQ ID NO: 20410 - DNA, 201 bp, Homo sapiens
agttccagaccagcctggcccacatggtgaaaccccgcctctactgaaaatacaaaaattagttgtgcatgatggtacatgcctgtagtcccagctactcrggaggctgagacatgagaatcacttgaacccaggaggtggaggctgcagtgagctgacatcgcatcacttcactccaacctgggtgacagagcgaaactc

SEQ ID NO: 20411 - DNA, 201 bp, Homo sapiens; identical to SEQ ID NO: 5327

SEQ ID NO: 20412 - DNA, 201 bp, Homo sapiens
tctgttcttgtaccagtactatactgttttgtcctccagagggcagcagacatcgaacagcaggctgtgtttgctgtgtttgatgagaacaaaagctggtmccttgaggacaacatcaacaagttttgtgaaaatcctgatgaggtgaaacgtgatgaccccaagttttatgaatcaaacatcatgagcagtaagtcagag

SEQ ID NO: 20413 - DNA, 201 bp, Homo sapiens
gatcctcagagtctagagtcatggtaatcaccttctctagtaggtaatcacacatgtgaggatgatttctgcatgttctgttcatatagcttcagatgacygacagctagggattatcagagctgacaggtgccaggtcaaataattcaaacagaaaattactctcagctttctttgcataacttccttttggcagtgaat

SEQ ID NO: 20414 - DNA, 201 bp, Homo sapiens
cttggcctcccaaagtgctggtattacaggcgtgagccaccgcgccaggcctacatttaagtctttaatccatcttgagttaatttttgtatatgatgtawgaaaggggtccagtttcaattttctgcctacggctagccagttttcccagaaccatttatggaatagagaatcctttccctattgcttgcttttgtcaca

SEQ ID NO: 20415 - DNA, 201 bp, Homo sapiens
gttttacgtttaagtgtgttgttgttgttttttgtttgtttgtttctgttatttttgagatggagtctcgttctgttgcccaggctggagtgcagtggtaygatctcagctcactgcaacctctgcctcccatgttcaggtgattctcctgcctcggcccctcggcctcccgagtagctgggattacaggcataagccacg

SEQ ID NO: 20416 - DNA, 201 bp, Homo sapiens
gggttttacgtttaagtgtgttgttgttgttttttgtttgtttgtttctgttatttttgagatggagtctcgttctgttgcccaggctggagtgcagtggyacgatctcagctcactgcaacctctgcctcccatgttcaggtgattctcctgcctcggcccctcggcctcccgagtagctgggattacaggcataagcca

SEQ ID NO: 20417 - DNA, 201 bp, Homo sapiens
tcatcgcctttggaatagatacatcactacaatggattggaagtttgtgtcctccaaaaattcacatactgaaatctaacctccagtgtgatggcattagyaggtggggcctttgggagatttttttttattatactttaagttttagggtacatgtgcacattgtgcaggttagttacatatgtatacatgtgccatgct

SEQ ID NO: 20418 - DNA, 201 bp, Homo sapiens
ttatgtgcaggatgtgcaggtttgttacataggtaaacatgtgtcatggaggtctgttgtacttactacttcatcacccaggtattaagcctagtatccaytagttattttttctgatcctctccctctttccaccctccatcctctgataggccccagtatgtattgttcccttctatgtgtccatgtgttctcataatt

SEQ ID NO: 20419 - DNA, 201 bp, Homo sapiens
tacagacatagtttaaatatttgttttcacaggacttcttgggcctactttatatgctgaagtcggagacatcataaaagttcactttaaaaataaggcasataagcccttgagcatccatcctcaaggaattaggtacagtaaattatcagaaggtaagataaatctaatatttttctgaaaagggaaaatgtctaagtc

SEQ ID NO: 20420 - DNA, 201 bp, Homo sapiens
gtagccctagaagaaatctagaggtcaaacctatcacaattagggcaccaacatgtaccctagagttaactaggcagagcccctcaggggcccaggccctktcttctttacatttgtactctggcatttagcacagagcctggaacctagtggatgatgatggtcatgatcatgatgatattaatcattactgaactaaac

SEQ ID NO: 20421 - DNA, 201 bp, Homo sapiens
attattggcatataatattgcctctggtcctatgaatctaagaaaggtaaatacatattggtagggaaagtaaaattttaccttggaaatgagatgcaaayctagtaagcagatagtatcttttatggtaaaagacaagccttataagttgattttattatgccctctgcattaaaataaaacatctcctcctccatgtct

SEQ ID NO: 20422 - DNA, 201 bp, Homo sapiens
agggcctttgcgcacgctactctaactttttagaatgtctttggccatcccttttcctctctgcctttggacctcagttaaaggattaattcctcgggaarggattccccaactcacctccaattggactagattccactgtcaaatactcttcagagtattccctccttttctgtcataatatttaccataggtttaaat

SEQ ID NO: 20423 - DNA, 201 bp, Homo sapiens
ccagaaatcagagtttaccattgcttctgtaaccagttactgcaaacttagtggctaaaacaacacaaatttattcttttatgattatatatctgcagatsagaagtccaaaatgggttttattgggctaaaatcaaggtgttggcagagctgcattccttctggaggctctgggggagaattgtttccttgtcttttcca

SEQ ID NO: 20424 - DNA, 201 bp, Homo sapiens
cccagaaatcagagtttaccattgcttctgtaaccagttactgcaaacttagtggctaaaacaacacaaatttattcttttatgattatatatctgcagaygagaagtccaaaatgggttttattgggctaaaatcaaggtgttggcagagctgcattccttctggaggctctgggggagaattgtttccttgtcttttcc

SEQ ID NO: 20425 - DNA, 201 bp, Homo sapiens
ccaaggcagatggatcacttgaggtcaggagttccagaccagcctggcccacatggtgaaaccccgcctctactgaaaatacaaaaattagttgtgcatgrtggtacatgcctgtagtcccagctactcaggaggctgagacatgagaatcacttgaacccaggaggtggaggctgcagtgagctgacatcgcatcacttc

SEQ ID NO: 20426 - DNA, 201 bp, Homo sapiens
tgaggccaggcgtggtggctcatgcactttgggaggccaaggcagatggatcacttgaggtcaggagttccagaccagcctggcccacatggtgaaacccmgcctctactgaaaatacaaaaattagttgtgcatgatggtacatgcctgtagtcccagctactcaggaggctgagacatgagaatcacttgaacccagga

SEQ ID NO: 20427 - DNA, 201 bp, Homo sapiens
ccaggctggtctcaaactcctgacctcgggcaatctgcctgcctcagcttcccaaagtgctgggattacaggcatgagccattgcgcccggctgaacaatktattttcttttttggctatatacccagtaatagaattgctaggtcaaattgtagcaggacaagccacagacaaaaacccctcagacaccaagttaaagaa

SEQ ID NO: 20428 - DNA, 201 bp, Homo sapiens
gggtttcaccatgttggctaggctggtctcgaactcctgacctaaggtgttccacctgcctcagcctcccaaagtgctggtattacaggtgtgagccactstgcccggctcttttgggatattttaatctctgaattttcttatctgttctgtttgcttttgcatattacctttagctctaacaagtgctgtgtacacaat

SEQ ID NO: 20429 - DNA, 201 bp, Homo sapiens
ttgggcctactactcagctgtgaacccagtaggtactttcattgaaagtttttctcattcccctaacctcgtaatctgaagtccaccaaatggaagagtcrgggttatttcttgtcaaatgtctgtcttgcttttcatgaggaatgcataagggtgtggttaacagtctgcatttatcataaccagggactctccatgcag

SEQ ID NO: 20430 - DNA, 201 bp, Homo sapiens
ctggttattttttaattttaaaagaaaaagatgctcatataattttaaattcaaatgcaacttttagtttttatttagtatttgtatttatttacagcttrctcagtaatacaaaggatctgagacagtttctcaagttataaaggcataaaacaaggagtctatgtaattgggatagaatatgcggacaaagaaaataaa

SEQ ID NO: 20431 - DNA, 201 bp, Homo sapiens
ctcttgagtagctgggattacaggcgcccgccaccacccccatgtaatttttgtattttttagtagagacagggtttcaccatgttggctaggctggtctygaactcctgacctaaggtgttccacctgcctcagcctcccaaagtgctggtattacaggtgtgagccactgtgcccggctcttttgggatattttaatct

SEQ ID NO: 20432 - DNA, 201 bp, Homo sapiens
attacattgctgctgaagaaatatcctgggattattcagaatttgtacaaaggtttggccagttttctccttttttattctcatttttccattactgctgmaaaaagtagctactacaattcagggggataattgtgggcaaattatactaagaacagtgtggttcccctattgcaagttggcctgttctttttcctttgt

SEQ ID NO: 20433 - DNA, 201 bp, Homo sapiens
ctcctgcctcagtctcttgagtagctgggattacaggcgcccgccaccacccccatgtaatttttgtattttttagtagagacagggtttcaccatgttgkctaggctggtctcgaactcctgacctaaggtgttccacctgcctcagcctcccaaagtgctggtattacaggtgtgagccactgtgcccggctcttttgg

SEQ ID NO: 20434 - DNA, 201 bp, Homo sapiens
gagatcagactggggtgaccaaacattccattttgccgtggactttttaccagttctaatagttaaagtcctgaatcttgggaaacccctcagaccagaamagtcggttaccttcttggttcccttcttggcctaatcctttagcaatccctgtgtttttgagttcacatccaccatctctaagctctgttgttacctgta

SEQ ID NO: 20435 - DNA, 201 bp, Homo sapiens
gattctcctgcctcagtctcttgagtagctgggattacaggcgcccgccaccacccccatgtaatttttgtattttttagtagagacagggtttcaccatkttggctaggctggtctcgaactcctgacctaaggtgttccacctgcctcagcctcccaaagtgctggtattacaggtgtgagccactgtgcccggctctt

SEQ ID NO: 20436 - DNA, 201 bp, Homo sapiens
caggggcacattattctgcctactacacccaccaaacaaagccctcccacggtgtcctccatctcagagaatggcaccctcctccacccagctccccaaaycagaacctcatcagccatccacagcaactgatgtcctttattctctaccccacatccaatccatcttcaagttccaactattttatctcataaatacatc

SEQ ID NO: 20437 - DNA, 201 bp, Homo sapiens
gagagcagtggcaccattttagatcactgcaacctctgcctcctgggttcaagtgattctcctgcctcagtctcttgagtagctgggattacaggcgcccrccaccacccccatgtaatttttgtattttttagtagagacagggtttcaccatgttggctaggctggtctcgaactcctgacctaaggtgttccacctgc

SEQ ID NO: 20438 - DNA, 201 bp, Homo sapiens
cagagatagacagactttcagctgccatagcgaaatgagatttttcttttgggatttgttttttttttttttttcttttgagacagagtctcactctgtcwcccaggctggagagcagtggcaccattttagatcactgcaacctctgcctcctgggttcaagtgattctcctgcctcagtctcttgagtagctgggatta

SEQ ID NO: 20439 - DNA, 201 bp, Homo sapiens
ggacagcccagaagaatctcatctcaagattcttaatcatagatacacagtcccttttgccatataaagtagcatatttccaggtcccagagattaggacrtggacatctcagcaggggcacattattctgcctactacacccaccaaacaaagccctcccacggtgtcctccatctcagagaatggcaccctcctccacc

SEQ ID NO: 20440 - DNA, 201 bp, Homo sapiens
agatatacctaatgttaatgacaagttaatgggtgcagcacaccaacatgacacatgtatacatatgtaacaaacctgcacgttgtgcacatgtaccctaraacttaaagtataatttaaaaaaaataaaaataaaagaattccttttgcaatattaattggttccagcgaaagcttatttatttatttattatcatgaaa

SEQ ID NO: 20441 - DNA, 201 bp, Homo sapiens
gggggagggatagcattaggagatatacctaatgttaatgacaagttaatgggtgcagcacaccaacatgacacatgtatacatatgtaacaaacctgcaygttgtgcacatgtaccctagaacttaaagtataatttaaaaaaaataaaaataaaagaattccttttgcaatattaattggttccagcgaaagcttattt

SEQ ID NO: 20442 - DNA, 201 bp, Homo sapiens; identical to SEQ ID NO: 5313

SEQ ID NO: 20443 - DNA, 201 bp, Homo sapiens
gggcctgtcggggggggggggtggggggcggggggagggatagcattaggagatatacctaatgttaatgacaagttaatgggtgcagcacaccaacatgrcacatgtatacatatgtaacaaacctgcacgttgtgcacatgtaccctagaacttaaagtataatttaaaaaaaataaaaataaaagaattccttttgca

SEQ ID NO: 20444 - DNA, 201 bp, Homo sapiens
cacgagggctgtgtaccattaaacaacagtaaaatcattagtaatttttcggtcctgttttcttcaaagcactagagaagttgaccatactcactgttttscaactccctatcaagaaggaaatattttctctttttttttttaaacaggaaatagaagagacaaattagaagctagagaagaaatgtgcagccttgttag

SEQ ID NO: 20445 - DNA, 201 bp, Homo sapiens
agaaactaccagagttacctgttgcccataccagtggggtaagccctatgaatgtatatgagagtttcaaacatccacaaaacattggctttctaatattygtattcccactattcctttcttttcatgattcatgtcattgtcccatcaacatttctaagatttccattccgttaagagcaaaagagaatgttggaaggt

SEQ ID NO: 20446 - DNA, 201 bp, Homo sapiens
ataaatatgctattttaaaaaataagaatttcttcaagttgaaatcattatggttgattgcttgccctaaactctttgctatccaggaaagctaatgagcrtcttctatctgcagtgctactgaaaacatgtctttcctttcatagggaccctaactgagggtgggacacagaagacgtttgacaagcaaatcgtgctact

SEQ ID NO: 20447 - DNA, 201 bp, Homo sapiens
ccccccaccaagggtcttactctgtcacccaggctggagtgcagtggtgtgatcatggctcactgcaacctccacttcctgggctcaggcgattctcgcayctcagcctctcaagtagctgggactacaggcacacgccccaacgcctggctaatttttgtatttttttgtagagatgaggtttcaccatgttgcccaggc

SEQ ID NO: 20448 - DNA, 201 bp, Homo sapiens
aaattctgactcagccatcaactttttccctaactccccagacagaatttgtgcttcatcctctcttcttctgtaatattttgcccatatctcagcagtcrctcctatcatacatctatctccaaactagcttgtgagttccttcagtacagggactgtatttgatccaggtagccagaaactttctaacacagtgcctgg

SEQ ID NO: 20449 - DNA, 201 bp, Homo sapiens
ttttattgttgttttttgaatatttttgatccaaaattggttgactccatggatgtgtaaccatgaatatgaaccatggtcatggagggctgactatatayaattcctcaaattctgactcagccatcaactttttccctaactccccagacagaatttgtgcttcatcctctcttcttctgtaatattttgcccatatct

SEQ ID NO: 20450 - DNA, 201 bp, Homo sapiens
gcaataacctatgcacatcctctcatatactttaaatcatctttaaattagttataatactgaatgcaatgtaaatactatgtaaattgctattatgttakagttttatttgtattgtttttattgtttattttttattgttgttttttgaatatttttgatccaaaattggttgactccatggatgtgtaaccatgaata

SEQ ID NO: 20451 - DNA, 201 bp, Homo sapiens
ccccaagtatattttataaccaaattgatttagtttggaccccatgaaaatgtagtattacaatattaaattagatcaaaattttaatataaagtcacttyatagatcattgttacataactaaactttcctcttttcttctagtattttaatggcaattcagatgcctctacaataaaagagaatcagtttgacccacct

SEQ ID NO: 20452 - DNA, 201 bp, Homo sapiens
aacgcctggctaatttttgtatttttttgtagagatgaggtttcaccatgttgcccaggctggtcttgaactcctgagctcaagtgatccacctgcttcakcctcccaaagtgctggggttacaggtttgagccactgaacctagctgagaagatgacttcaaagacagtgtcctaaaaaatctaccgggcaggggaaggg

SEQ ID NO: 20453 - DNA, 201 bp, Homo sapiens
cacgccccaacgcctggctaatttttgtatttttttgtagagatgaggtttcaccatgttgcccaggctggtcttgaactcctgagctcaagtgatccacstgcttcagcctcccaaagtgctggggttacaggtttgagccactgaacctagctgagaagatgacttcaaagacagtgtcctaaaaaatctaccgggcag

SEQ ID NO: 20454 - DNA, 201 bp, Homo sapiens
caatttattattatcatcattgttactgggataaagatcaatcagaggaaggaggattatgaatacaacagaattaggtgataaatatccaggcttattaygccattcatttataatcttcatcttcaaattcagagcctatcagaaagtttccttttctatatgatgagtgattatcagaagagcaaggaaattcctgag

SEQ ID NO: 20455 - DNA, 201 bp, Homo sapiens; identical to SEQ ID NO: 20104

SEQ ID NO: 20456 - DNA, 201 bp, Homo sapiens
aaactaggaaaggaaaaagaaaagaaagggaagagaaaggaaggggagggaaaggattaatcatttcagttttcaaaaagtgtagttgcttcagtaagagkagttttattggccttttaccccatcatgtaaaacatttcaggcttttttccccagatccttgttgtctgcctacatccacactgatgttctcaccttctt

SEQ ID NO: 20457 - DNA, 201 bp, Homo sapiens
ctagttctggtaatttctttcaaaatcttgtgtccagacccacgattataacttgcttttataacaaagtttacttccgccatttttgctaaccgctcacrttcaaaaacccagaaagaaccctgattctaaagtaagctattctagattttaaaatataatctactatacctgtgtaagcattcactacattttcagtga

SEQ ID NO: 20458 - DNA, 201 bp, Homo sapiens
gtggtgtgatcatggctcactgcaacctccacttcctgggctcaggcgattctcgcacctcagcctctcaagtagctgggactacaggcacacgccccaaygcctggctaatttttgtatttttttgtagagatgaggtttcaccatgttgcccaggctggtcttgaactcctgagctcaagtgatccacctgcttcagcc

SEQ ID NO: 20459 - DNA, 201 bp, Homo sapiens
ctgttctctccataactaaaatgtctctacctcttttatgcctgtgaaaacctctagctggttatactctgcatcactggtacaaccttgatatgaagacwcactaagataccacccagatgtcactagaggatgttatagacttaaaagttttctcatataatcattctaattcagttaatttgcttttaaaatacatat

SEQ ID NO: 20460 - DNA, 201 bp, Homo sapiens
tttagcctcaggagcatagaagtctaggctccccattcagcctttgctgttgtgggttggggaggggcctcaggtttttctgtggtgtttggctaaaggasagaagtcagtgtccaccagttttctatcatatctcgctatgctgccctttactggtactttggttagagaaagcagattttatttgggctttttcagtct

SEQ ID NO: 20461 - DNA, 201 bp, Homo sapiens
aaagttcaggatctggctatttgtctgtgcctctcaagcaagtagcttttcccccccaccaagggtcttactctgtcacccaggctggagtgcagtggtgygatcatggctcactgcaacctccacttcctgggctcaggcgattctcgcacctcagcctctcaagtagctgggactacaggcacacgccccaacgcctgg

SEQ ID NO: 20462 - DNA, 201 bp, Homo sapiens
gagcatagaaatgggcatatgtgaatctttccaaataataaaagttcactattgaaggacatatgcatctccagagaactcatcttagctatccccagatktgagagtggtgaaaacgcaatcctcagaaactgcccacatgtcttgatggctgttactcctccaggtgcttcttaccttgaccacacattccctgcggag

SEQ ID NO: 20463 - DNA, 201 bp, Homo sapiens
agtacatgagcatagaaatgggcatatgtgaatctttccaaataataaaagttcactattgaaggacatatgcatctccagagaactcatcttagctatcmccagatttgagagtggtgaaaacgcaatcctcagaaactgcccacatgtcttgatggctgttactcctccaggtgcttcttaccttgaccacacattccc

SEQ ID NO: 20464 - DNA, 201 bp, Homo sapiens
tcattgcgtttttctttctttttttgagacggagtctcgctctgtcgcccaggctggagtgcagtggcgcaatctctgctcactgcaagctccgcctcccrggctcacgccattctcctgcctcagcctcccgagtagctgagactacaggggcccgccaacacaaatacaaaatacaaaaaatataattttttgtatttt

SEQ ID NO: 20465 - DNA, 201 bp, Homo sapiens
tatcaaagcctttgtaagtacatgagcatagaaatgggcatatgtgaatctttccaaataataaaagttcactattgaaggacatatgcatctccagagarctcatcttagctatccccagatttgagagtggtgaaaacgcaatcctcagaaactgcccacatgtcttgatggctgttactcctccaggtgcttcttacc

SEQ ID NO: 20466 - DNA, 201 bp, Homo sapiens
tcaatcatcgccattctgactggcatgagagggcatctcattgcgtttttctttctttttttgagacggagtctcgctctgtcgcccaggctggagtgcartggcgcaatctctgctcactgcaagctccgcctcccaggctcacgccattctcctgcctcagcctcccgagtagctgagactacaggggcccgccaacac

SEQ ID NO: 20467 - DNA, 201 bp, Homo sapiens
acaacaggatatttttgaagagaccaataattatttcattaactttacttattgatcatatttataaaactgtggacttctgaaatacaataaagatactrgtattctactagaagtctgaagatatgagagatctactttttttgtaatgtgagaaatagatattgaatatgcctttcaaattagtttttgtattttatt

SEQ ID NO: 20468 - DNA, 201 bp, Homo sapiens
tttcttgacttttcaatcatcgccattctgactggcatgagagggcatctcattgcgtttttctttctttttttgagacggagtctcgctctgtcgcccargctggagtgcagtggcgcaatctctgctcactgcaagctccgcctcccaggctcacgccattctcctgcctcagcctcccgagtagctgagactacaggg

SEQ ID NO: 20469 - DNA, 201 bp, Homo sapiens
ccatgagaatccagcccatctttcattaaaacaaacaaccacagtgagccacagcatgggaaataacgtgatggactcaccatctgcctatacatacacgctcaggccatacctacatacatgcccaatgtatttactcattatacaaagactttttttccatttcctggtatatataagatactgtgatggtactgaaaa

SEQ ID NO: 20470 - DNA, 201 bp, Homo sapiens
atttactctgtttttccaggaaaaagatattcactcaggcttgataggtcccctcctaatctgccaaaaaggaatactacataaggacagcaacatgcctrtggacatgagagaatttgtcttactatttatgacctttgatgaaaagaagagctggtactatgaaaagaagtcccgaagttcttggagactcacatcctc

SEQ ID NO: 20471 - DNA, 201 bp, Homo sapiens
cattttgagctaataggataaaaaattttctgggttgggcatgatggctcatgtctgcaatgccagcactttggaaggctgaggcaagaggattacttgaraggagtttaaggctgcagtgagccatgactgtgccactggactcaagcctgggcaacagaataagaccctgtctaaaaaaaaacaaaaacaaaaaacctt

SEQ ID NO: 20472 - DNA, 201 bp, Homo sapiens
aaaggattaatcatttcagttttcaaaaagtgtagttgcttcagtaagaggagttttattggccttttaccccatcatgtaaaacatttcaggcttttttycccagatccttgttgtctgcctacatccacactgatgttctcaccttcttctcgtaaagaatttatcaagttattgtaccaaacaaaaataactgcatcc

SEQ ID NO: 20473 - DNA, 201 bp, Homo sapiens
ataatttctcaaaccaaattggaaaacattataagaaagttatgtacacacagtacgaagatgagtccttcaccaaacatacagtgaatcccaatatgaargaagatgggattttgggtcctattatcagagcccaggtcagagacacactcaaagtaagtaacacaaatacagaatcatgggagaaattacatagtaaaa

SEQ ID NO: 20474 - DNA, 201 bp, Homo sapiens
tttgtcgtctatgttcatgagaggatattggtatatagttttatttttttaattgtctttttctgtttttgataccacagttatactagctttcataaaaytggtaagcatgctcttttctacattctaggagaaaatgtctgcaattggtaataattctttaaatatttggtaggaatcactagtgaaaccatctgggcc

SEQ ID NO: 20475 - DNA, 201 bp, Homo sapiens
ttggataatttctcaaaccaaattggaaaacattataagaaagttatgtacacacagtacgaagatgagtccttcaccaaacatacagtgaatcccaataygaaagaagatgggattttgggtcctattatcagagcccaggtcagagacacactcaaagtaagtaacacaaatacagaatcatgggagaaattacatagt

SEQ ID NO: 20476 - DNA, 201 bp, Homo sapiens
aaatgatctcaacccgtccctctccaaaaattcacctgcctggtttctgaaatttcacagcagttcctctaacttaagaaggaggaaacaaagcacttccytcactttggtttcagttaaacgtttggtaacactaaactttatctttacagttttgtgttacatttttaaggtgatcaagtttctcaggaactttttaaa

SEQ ID NO: 20477 - DNA, 201 bp, Homo sapiens
cccatgagaatccagcccatctttcattaaaacaaacaaccacagtgagccacagcatgggaaataacgtgatggactcaccatctgcctatacatacacgctcaggccatacctacatacatgcccaatgtatttactcattatacaaagactttttttccatttcctggtatatataagatactgtgatggtactgaaa

SEQ ID NO: 20478 - DNA, 201 bp, Homo sapiens
aaatgtcacctaatttatgaactatttgcagcaccacacaggctaaatgtgtgacccaactcagttgcaacataacatgcagtttctcccaagccactgtrtgtcatacagatgaggtcttaagcagatgaaaaaatgaatcccacagggctcaggcagctacagctatctctgctgggagggtttccagattcttcagtt

SEQ ID NO: 20479 - DNA, 201 bp, Homo sapiens
tgagttgggattcaaatttaggtactctgtgcccaaatatgaattgcatgtagtcattgtatcagtttgctaagatcttatgtgctagctctttagttctraagaaagctgattgtataatgaatttaggcagtgtgtgacttgttgacaaggacagttctgtttactggctttcctatattgcaggtggacatgcaaaag

SEQ ID NO: 20480 - DNA, 201 bp, Homo sapiens
gacaaaacatataaaacagaagttttcagacatcgaatgacagacaactcaagacagtaaaagaagagtaacaaaccagatgtgccctatgagcacctaarcttactgcttgaagagtgtttccagggaacagcacaagcagggagaacccagacagagtctctatgggttgaggaaatagagtttggacttcggagaagc

SEQ ID NO: 20481 - DNA, 201 bp, Homo sapiens
agatttaccctttttctcaacaactagacaggcagacaaaacatataaaacagaagttttcagacatcgaatgacagacaactcaagacagtaaaagaagwgtaacaaaccagatgtgccctatgagcacctaagcttactgcttgaagagtgtttccagggaacagcacaagcagggagaacccagacagagtctctatg

SEQ ID NO: 20482 - DNA, 201 bp, Homo sapiens
tccatgctcagaacctcatgagatacattgcacgttactgtagtacctgaatccttcattgctattgaatggatgtgccttattttccactcccacctggrgaatccaaacatatgctgatgccatgcaaactcatgcaaagcgttttgagtggaatagattttccacagttgggatggggaaaggtacaattaaagaagg

SEQ ID NO: 20483 - DNA, 201 bp, Homo sapiens
gcccacacagagtagtataatagtttgttagggtgggccatgttggtaaggagtgatcttatatttgctagaggatgctgtcttcttccacaggtatggcracaatttctttcacaagctactcaattaaaaactggaataacctagcactacacttctatttatttccattatttttcagctcaccttctagattagtat

SEQ ID NO: 20484 - DNA, 201 bp, Homo sapiens
gactttgggcaaacaacttcatctctttgtgcctcagtctcttcattcatggaaatgggattataaaatcagtagctacctcagagatttgttgtaagaaktaagtgaagaaaagagccatgtttggtacattaaagcaatcaatcaatcgtagataatatgaaagtactggactaactatatgtccctattgaaactccg

SEQ ID NO: 20485 - DNA, 201 bp, Homo sapiens
agcaacagaaagaagacaaaggctatgggtgcaaatataagtaaacgtataactaatgaagctattatctccattttacatatgaagccagtactcaaaawaaaaaaatcaaagtccataatctttcccattctctgggctagataaagattattagcaggaaaattacctagtgcccacacagagtagtataatagtttg

SEQ ID NO: 20486 - DNA, 201 bp, Homo sapiens
aatataaattaagtaatggctctcctcttagtagattttaacttttgctcttgttattctaaaggccaagaaagcagagaactcatcaaatgaggaggaarcgtcaagtgaaggcaacatgagggtgcatgctgtgggtgagtatgcatgaagcaagctgtttgtgactatatcaaggaagaaatggaatctgccactttg

SEQ ID NO: 20487 - DNA, 201 bp, Homo sapiens
gcttgaacccgggaggcagagtttgcagtaagccaagatcccaacactgcactccagcctgggtgatagagtgagactcggtctcaaaaaaaaaaaaaaaatgaaagatgttcaaacaatgagcattcaaatctactcgcaattctcaccacacacacacacacaaaaatgatagtatgtgaggtaatgcattcgttaatc

SEQ ID NO: 20488 - DNA, 201 bp, Homo sapiens
tgcttgaacccgggaggcagagtttgcagtaagccaagatcccaacactgcactccagcctgggtgatagagtgagactcggtctcaaaaaaaaaaaaaaaatgaaagatgttcaaacaatgagcattcaaatctactcgcaattctcaccacacacacacacacaaaaatgatagtatgtgaggtaatgcattcgttaat

SEQ ID NO: 20489 - DNA, 201 bp, Homo sapiens
aatactggagatacagcaacgaaaagaaaatctctgccttcatgagtttacattctgggtgaagagacagactctaaacaaataagtatatatgtgtgtgygtatgtaatgtttgtatatgcatatatttgtacatacatatatatgcatatatgcaattatatatagtaaaatgagcatttatgtaaatataaccaaatc

SEQ ID NO: 20490 - DNA, 201 bp, Homo sapiens
ctctgggaaaggcatctctgaaagtaaggcagcagccccagtcaggggtttatagataaagctcccatctccttgggacagagcacctgggggaaggggcrgctgtgggcagagcagacttaaatgttcctgcctgccagctctgaagagagcagcagatctcccagcacagcactcaagctctgctaaggaacagactgc

SEQ ID NO: 20491 - DNA, 201 bp, Homo sapiens
gcactttagggggctgaggcaggcagatcactttgagctcaggagtttgataccagcctgggtatcatggcgaaaccctatctccaggaaaaaaaaaaaaatcaataggagagatgtaaggtaaaagtgagaaagtttcccagaatgatagacacactgttgaagagaagagcaaaaatgattagcaaatcggagaatcaa

SEQ ID NO: 20492 - DNA, 201 bp, Homo sapiens
ttttttcagacaaatgcaagattattatctgatcattccaaaccaactgctgaaacggtagcacctgacaacactgcaatccccagtttaagggctgaagmtgaagaaaatgaaaaagaaacagcagtatccacagaagacgattcccaccataaggtaaaagtaacatcatttatattaatacaattttttaattctcca

SEQ ID NO: 20493 - DNA, 201 bp, Homo sapiens
agcactttagggggctgaggcaggcagatcactttgagctcaggagtttgataccagcctgggtatcatggcgaaaccctatctccaggaaaaaaaaaaaaatcaataggagagatgtaaggtaaaagtgagaaagtttcccagaatgatagacacactgttgaagagaagagcaaaaatgattagcaaatcggagaatca

SEQ ID NO: 20494 - DNA, 201 bp, Homo sapiens; identical to SEQ ID NO: 5342

SEQ ID NO: 20495 - DNA, 201 bp, Homo sapiens
atacattatatgtagtgaagcatcactatgtaccccatgaatatgtataattgttatttgtcaatttaaaaataaaattaaaaaagaaaatgaagtataarggtataattttttttaatcaataaaacaggccaggcacagtggctcatccctgtaatcctagcactttagggggctgaggcaggcagatcactttgagct

SEQ ID NO: 20496 - DNA, 201 bp, Homo sapiens
ctccagagaaacagaacaaataggagataggtaggtaggtaggtaggtagatagatagatagatagatagatagatagatagatagatgatagatagatagagatatagataatgaggacttagtttacattaatggagccagtcccaagatctgcagtcagcaaattggaaagccaagagagccaattgtatagttcccg

SEQ ID NO: 20497 - DNA, 201 bp, Homo sapiens
gtccaaacatcttatttaaatctaagcatttgttttgttctcataggccagacatagatgtatgatataaagtaaatccattactcaaaatatcagtaatmtattaagattaaaaagcacagaacattgattccaaaagcttccagagaaaattcattcaccagatagttattgagtgtatcctgggtgccagaaattgac

SEQ ID NO: 20498 - DNA, 201 bp, Homo sapiens
gtttactgtggcatacaggggaaaaacaactgggaaggcaaagaaagagaaatagaaatggcctcacatgatacacatactgcagcaaaccctgcaataawtccatttttcaagttcccactgcttcctcccatcttcacgatgtgctatggtgtagtggttatagaggggaattctggggcagactgcctggacttgaat

SEQ ID NO: 20499 - DNA, 201 bp, Homo sapiens
gagattctgcttccacttaacattctgttctaggcatctgcttatatcctcaaaaactctagagaatatttttaaattgttggtataaatgaagtatattsctactaataatgatgacaacaagagtaactagcaaatttgtaaattagcatccagacatgaataacaaaaaccagtttttaattttttcagacaaatgca

SEQ ID NO: 20500 - DNA, 201 bp, Homo sapiens
ttttttgcctcctactatcatttgttaagatgctcacacatagacctaaaatttctctaattcttgataatgtcttatttacaaaagcaaaaatgggagargagaattaaagagctaaagagattatggtaactcatattataatgtactaccatttctggctctcttttctaaaataaagcaataatgtaggttgtgctt

SEQ ID NO: 20501 - DNA, 201 bp, Homo sapiens
ttggttcccttttacagctttataactaattattttttgcctcctactatcatttgttaagatgctcacacatagacctaaaatttctctaattcttgatratgtcttatttacaaaagcaaaaatgggagaagagaattaaagagctaaagagattatggtaactcatattataatgtactaccatttctggctctcttt

SEQ ID NO: 20502 - DNA, 201 bp, Homo sapiens
gctcatctattatagaggcacgttaatattcttggtggtcacaatttttaattgtgggttgtttgtgataaagacatactctaatcccaacctaagagatkaagttattttctcagtaatcagtctgtaagtctacctctgtgtaattgagatattttggaagttggagctcctggtgtgaaagcaattattcagtttagc

SEQ ID NO: 20503 - DNA, 201 bp, Homo sapiens
atgttgtttttagactttttaattacagccattctgactggtgtgaaatggcatcttattgtgagatggttttgatttaaattttcctgatgattagtaaygtggaactttatatatatttgttggccgcttatatatcaagacagggttttggaactgaaatgcatatttgaggattataagcatacagagaataattga

SEQ ID NO: 20504 - DNA, 201 bp, Homo sapiens
gagagaagtaaacatattcaagatatattttaagatataagcatactcaaatatatagcatgtggaaataagacaatatttgataggaaatatgtgggagycgagagcagacaggtgagagactgaaaagagaagtgcaatgcctaggtccctggctcagagcaggcagggtaaatagaggtaaatagaggcatcttccac

SEQ ID NO: 20505 - DNA, 201 bp, Homo sapiens
cttatctgtaaaaatggggttcaggtaacaggtgcaggaatcctcatttattttgtgcccatgcataccatgcattgacacatacccatgctaatcgtcagaaaaccctccaagtgagactaacagggtaaacaactcagatgacgcaagttcccctaagccatttaaagacattatcctaagagtactggggggccacca

SEQ ID NO: 20506 - DNA, 201 bp, Homo sapiens
aggcagaacaatgaaaataataatcatttgcatgtgtaaggtacttcagagtttgcaaagagcttcctcacctcaccttgcaaggagctacctttgacatyggaaggaactggtattcccatcctatatatgaagtttggagagagaaagtaatttgttcaaggtagtatttagtacttggcaaagccagggcccaaagcc

SEQ ID NO: 20507 - DNA, 201 bp, Homo sapiens
atgaatgtacatgctcaataagtagtagttattacaattctttttcatggttttgttattgaaacagcaaggttccagtctaggtcctgctgctcacttcrtagaaagccaatcactgagacaacaagtattgccaatgaagaaggctttaatcaggtgctgcagctgaggagatgggagcacagtctcaaatccatctca

SEQ ID NO: 20508 - DNA, 201 bp, Homo sapiens
tacaggggtagtagagaaacaaataaattaaggggtagggagaagagttaaaggcagaaaaagcagaggattaatctatctgataattacaggggctaggytttaaaaggtgtattgtcttactattaacaacatgaagccaatcattcagatattattaagttactgcaacgtcacaaacgccaggactttaggtgagcc

SEQ ID NO: 20509 - DNA, 201 bp, Homo sapiens
caaggttctccagagaaacagaacaaataggagataggtaggtaggtaggtaggtagatagatagatagatagatagatagatagatagatagatgatagatagatagagatatagataatgaggacttagtttacattaatggagccagtcccaagatctgcagtcagcaaattggaaagccaagagagccaattgtata

SEQ ID NO: 20510 - DNA, 201 bp, Homo sapiens
cttgctaatggttttggcaactggtctgttttgccttattttggttttcggttgctgtaaaacagtatgctctcacattaaatggcttaaaatcacatccytgtatttgctcataattctccaatctggattgggctccactgcatgattcttctgctgattttgtctggagttaattcatctggcttcagtgagctagga

SEQ ID NO: 20511 - DNA, 201 bp, Homo sapiens
tcaaggttctccagagaaacagaacaaataggagataggtaggtaggtaggtaggtagatagatagatagatagatagatagatagatagatagatgatagatagatagagatatagataatgaggacttagtttacattaatggagccagtcccaagatctgcagtcagcaaattggaaagccaagagagccaattgtat

SEQ ID NO: 20512 - DNA, 201 bp, Homo sapiens
attagtcaaggttctccagagaaacagaacaaataggagataggtaggtaggtaggtaggtagatagatagatagatagatagatagatagatagatagatgatagatagatagagatatagataatgaggacttagtttacattaatggagccagtcccaagatctgcagtcagcaaattggaaagccaagagagccaat

SEQ ID NO: 20513 - DNA, 201 bp, Homo sapiens
gcctcataagcggacctcagaataacaggatttctctctctctaatcttctatttttttacctgctactttttctccccaaggcaggactctaatcttccyctgcctttacctaccttgtgtgattgtaggtcataagacccccatttcagaaggggttctgccccatattctggaggaaggaatgttgcatggagaggcc

SEQ ID NO: 20514 - DNA, 201 bp, Homo sapiens
catgtatctatatatgtatatatttatctatatacgtatctacattacatacatatatgtatctatacacacacacacacacacacacacacacacacacatatgtttcatccacggttcctgtctcataattcccatagacctttttataatgttataatgttggtgcattttaggcctcataagcggacctcagaataa

SEQ ID NO: 20515 - DNA, 201 bp, Homo sapiens
acatgtatctatatatgtatatatttatctatatacgtatctacattacatacatatatgtatctatacacacacacacacacacacacacacacacacacatatgtttcatccacggttcctgtctcataattcccatagacctttttataatgttataatgttggtgcattttaggcctcataagcggacctcagaata

SEQ ID NO: 20516 - DNA, 201 bp, Homo sapiens
tacatgtatctatatatgtatatatttatctatatacgtatctacattacatacatatatgtatctatacacacacacacacacacacacacacacacacmcatatgtttcatccacggttcctgtctcataattcccatagacctttttataatgttataatgttggtgcattttaggcctcataagcggacctcagaat

SEQ ID NO: 20517 - DNA, 201 bp, Homo sapiens
taaatatattatatatttatagatacattattagtatatacatatatagatacgtgtatataatacatatatagatacatgtatataagtatatagattayatatgtacacatatagtatacatttagccctcaacctgtgggatctgacactatctccaggtgcacatacatagtatatacacatatgtatactatatat

SEQ ID NO: 20518 - DNA, 201 bp, Homo sapiens
taaacctgctttaaatatctttatctattttttcatccattttgtcaaggtgaccttcctaagaataaaaataagcattgcttgagattttttttttttttgagacagagtctcattctgtcacccaggctggagtgcagtggtgtgaccttgggtccctgcaacctctacctcctgggctggagcaattcttctgcctca

SEQ ID NO: 20519 - DNA, 201 bp, Homo sapiens
gctagtttactgtggcatacaggggaaaaacaactgggaaggcaaagaaagagaaatagaaatggcctcacatgatacacatactgcagcaaaccctgcaataaatccatttttcaagttcccactgcttcctcccatcttcacgatgtgctatggtgtagtggttatagaggggaattctggggcagactgcctggactt

SEQ ID NO: 20520 - DNA, 201 bp, Homo sapiens
gaaaaagttgatctcatagaagtaagaagtagaacagaggatacttgaggctgggaagggtgaggagaagaaaggaatagggagctatttgttaaaggacrtaaaactatagctaataggaagaataagttctagtgctctataccactgtaggatattatatatttcaaatagctagaaagaagacactgttcccaatac

SEQ ID NO: 20521 - DNA, 201 bp, Homo sapiens
ctgctccttggaagccctccaatgctccatggaactattctttggaagccctccaagccctgtccataaagttctaattggctttctagtgactcactgcraagtattaatggacagccaaatacatcagacattagagaaaagctttcaacaggaaaaacaaagatcaaaacaaactaactggggaaaaaaggaacaaga

SEQ ID NO: 20522 - DNA, 201 bp, Homo sapiens
acttcaagaaaatacatttctgttgttttaagccacccagcttgtggtaatttgttatgacagcccaggaaactaatgcaaacctcttatggctctatagraccacgtgattgtacggcactaagataatctaaccctttatatttctgttatcccagttgtctcaattatttgtgtctttatagggctgcctcttatttt

SEQ ID NO: 20523 - DNA, 201 bp, Homo sapiens
ctgagggccaaagagcagcgcactgaaccacagaggattattctcaggcctgaaacatgatggaatttggcctgctctgttttgaacttgcttggaacaartgacccttgtccacttatgtattccttccattttctccatttcagaatgaaactgtttatactatgccattgtatttggggagaggtaactggttttcta

SEQ ID NO: 20524 - DNA, 201 bp, Homo sapiens
acagaagaaaaaagacaaaggggattaccagggcgtggtgaccccaggtatggaccccaggagaaaagctgcccagcagccggagatacaccagtccaaargaagcaagaactccgaggctctgggagtgccacttccaaggggcgaaatggacacgagggatttccttacggggttgttgatgtagctctgttgttgtta

SEQ ID NO: 20525 - DNA, 201 bp, Homo sapiens
aatcccagcactttgggaggccgaggcagatcacctgaggtcaggagttcaagaccagcctggccaacatggtgaaaaaatacaaaaattagccaggcgtrgtggcacacgcctgtaatcccagctacttgggaggttaaggcaggagaatcgctggaacccaggaggcagaggttacagtgagctgagattgggccactg

SEQ ID NO: 20526 - DNA, 201 bp, Homo sapiens
tgtttgtgctactactctggctactttctaaaagtgtcattttgcttcttgtttttttatagaggacatagatgaaaatctcttgttttgaacgaagattwtaaagaactcaactttccagcatcctcctctgttctaaccacttcagaaatatatgcagctgtgatacttgtagatttatatttagcaaaatgttagcat

SEQ ID NO: 20527 - DNA, 201 bp, Homo sapiens
caattagtgccgggataatcctttaacccaaaactcacccatggcttcaccctcaatgaatgggagctgtgggagggtagatcagagtattctttctttaytcctgcagtggaggaaattaaatttagatgcttgttttgctgggttatgtcttaatatgtttccttttctttccttaagttaggcttgaattttatgagc

SEQ ID NO: 20528 - DNA, 201 bp, Homo sapiens
gtatggccagtagatgagaaccaggttgtaccaacatgactgctgggtacacccctatagatttagggtgggggaaggacagttcctgtgaagacagaaamcttgtgaatcaacatcccaaaagctgtcaaccttacccacaaatactttatttcgttggcagtttttatctgtattctatttatatcacatatacagcaa

SEQ ID NO: 20529 - DNA, 201 bp, Homo sapiens
ggtcagatgcccagaaaagtcttaagtcattgactctgagtatatcatatacactcacagggctgggacaccttgatgtcagatggtgactcagcagagarctcaaaatagaagaacgtctttttcacccttcagatgactttagggccaaaccatagagctctccccagagactcattaatactttaaaagctctaaagc

SEQ ID NO: 20530 - DNA, 201 bp, Homo sapiens
ggatcaataatggctttccttgatctgaagtctgaatagaggttaactctgtgtgtgtgcgtgtgtgtgtgtgtgtgtgtgtgtgtgtgtgtgtgtgtgtktttggtggtggtggctgggaggagcgggtgctggagagagaattctgacagcgtgaacacttgtgcaaagaccctggagcaagagggatcgtggcctatt

SEQ ID NO: 20531 - DNA, 201 bp, Homo sapiens
aactgtaaactattttagaaaaaacagcttcagaaacaatgagagtttgaatatctgccaacaaacatttccaaataaagctatactgaaaagacaccgcraattcaaaggcctttttttattcatttttctctcttgttttgttgtaagaaatacagtgggtctttattaatcatgttataaattaataagacctccaat

SEQ ID NO: 20532 - DNA, 201 bp, Homo sapiens
ggctagtttactgtggcatacaggggaaaaacaactgggaaggcaaagaaagagaaatagaaatggcctcacatgatacacatactgcagcaaaccctgcaataaatccatttttcaagttcccactgcttcctcccatcttcacgatgtgctatggtgtagtggttatagaggggaattctggggcagactgcctggact

SEQ ID NO: 20533 - DNA, 201 bp, Homo sapiens
ttatgaagagaatacttctttctataatatccattcttttgctttttcaaattcaccttgttgctttctttctctaagaagattttttttccccagctttmtataactttttcccaagttcaagcaaaatagttattttgcttttctgtttggactctctccaggctctcctaatatctggattcttaaaacattttttca

SEQ ID NO: 20534 - DNA, 201 bp, Homo sapiens
agctaagggtctacttctaagcccactcccatggctctttgcaggagccttcagtatcccatcgtgtaggcctctggtctacagggctgcccacagcatgrtatctggattcctccagagcgagtgaccaggcagaaagagagaaaaagccaagactgaggccccaatgtcttttataacctaacctcagaagttatatat

SEQ ID NO: 20535 - DNA, 201 bp, Homo sapiens
aggaagcaagaaatcaaacagaagaaaaaagacaaaggggattaccagggcgtggtgaccccaggtatggaccccaggagaaaagctgcccagcagccggrgatacaccagtccaaaggaagcaagaactccgaggctctgggagtgccacttccaaggggcgaaatggacacgagggatttccttacggggttgttgatg

SEQ ID NO: 20536 - DNA, 201 bp, Homo sapiens
gaattctcccttcccctgcctttttgttctattcaggtccccagtggattgaattatgcccactcacattgggtagagcaatctgctttattctgtctacsaattcaaatgttaatttcttcagaacacaccctcagagacacacccaggaataatgtctaagtagatatctgggcatcccatggtctagtcaagttgaca

SEQ ID NO: 20537 - DNA, 201 bp, Homo sapiens
tcagaataaacacaatgtcaggtgggaggtggagccatacagaaacctagggactaagtgaaaaatcagtgtgtgcactgagagaactccagtctcttcaytgatttcacagaatgctagcaaccaggtttatatttgcttctcaaggtaagaggtatgaatttctcctctagagaaaagaaaatctccctgtaatatctg

SEQ ID NO: 20538 - DNA, 201 bp, Homo sapiens
tccctggatggatccatcccatctggagctctggaatgagacacagtgagattagtgagtggtatgataagacgagaaactctgaaaggcatgattaagakatggtgaaaggtggctattgcacaagcttgggtaagataagcctgggggatcctctaaatataattaaagtaatccctcaattacacattatagaaaagg

SEQ ID NO: 20539 - DNA, 201 bp, Homo sapiens
tatacttgtttcattttataaaatccaaattcagtttaaacctgtggctacagagtgtgaggaatattataaacatgtttacatgatagtgtgtgaagaaraagaataatgaatattaaatgttaccttaggcataaatatggttacattatcatttgtttgaagaatgaacttttttttcttttaaggctgaaaaatcat

SEQ ID NO: 20540 - DNA, 201 bp, Homo sapiens
aggctgaggcgggcggatcacgagttcaagagatcgagaccatcttggctaacacggtgaaaccccgtctctactaaaaatacaaaaaattagccgggcgyggtggcgggcgcctgtagtcccagccactcgggaggctgaggcaggagaatggcgtgaacccgggaggcggagcttgcagtgagccgagactgcgccact

SEQ ID NO: 20541 - DNA, 201 bp, Homo sapiens; identical to SEQ ID NO: 5351

SEQ ID NO: 20542 - DNA, 201 bp, Homo sapiens
tgggctggtcttgaacttctggcctcaagtgatccacccacctcggcctcccaaagtgctgggattacaggtgtgagccaccgtgcctggcctgtttctgmtacctttgtgatatccaatgctgtgtgtcaccctttcagccaacctgtttgcttgaggttagtgagactgtagtactgcttggagaggggtcatcctaaa

SEQ ID NO: 20543 - DNA, 201 bp, Homo sapiens
gagcactcctttcatttactcattcatttgctcaagaaatctttacaggccaggcgcggtggctcacgcctgtaatcccagcactttgggaggctgaggcrggcggatcacgagttcaagagatcgagaccatcttggctaacacggtgaaaccccgtctctactaaaaatacaaaaaattagccgggcgcggtggcgggc

SEQ ID NO: 20544 - DNA, 201 bp, Homo sapiens
atgtgtaagaaaataagaactaggtaggggtaaggaaacaatcatggtgaataagcggtcaggcatctgctgcagtgatctggtgagtttccattcttttmtacttttttagaagcctgaaggtcctgtcctgaggaaggaacttagataaaacaaatataagtttcacactttaagaccaggagggtcaacttctatgtt

SEQ ID NO: 20545 - DNA, 201 bp, Homo sapiens
tatgaaccttgcctttttctttcagagaatttttcacacagccattgagcaattagagtgctggcatttccttcctaggtcttttgagatttaatccccartagctcctcatggcacagattcacatatcaactaagtaaaaataatagtgatgacagaaataaaatgaatagtgatgcatctggacaacttgaaaacatt

SEQ ID NO: 20546 - DNA, 201 bp, Homo sapiens
gagttctggggtctttatgggcacaggatggggacggggcaggccgtaggtagttttggaaaaggcaatattcaattggtaaaaagacagtattcagaaakaaccaatcgggagagaatggaagttctcactttgggctgtgggtttcaggcttttcggcttgaaggtgggattttgccagcgacccgcccctgtatgcct

SEQ ID NO: 20547 - DNA, 201 bp, Homo sapiens
agaatgatgaggattaatgagttttactacttgggctgagctgctgtatacttgtttcattttataaaatccaaattcagtttaaacctgtggctacagaktgtgaggaatattataaacatgtttacatgatagtgtgtgaagaaaaagaataatgaatattaaatgttaccttaggcataaatatggttacattatcat

SEQ ID NO: 20548 - DNA, 201 bp, Homo sapiens
catttgtctgattctctgacagtcttctgccttcctaatcccaggtcaagaaaatttacctggatgaaaagaggcttttggctggggaccatcccattgaycttctcttaagggactttaagaaaaactaccacatgtatgtgtatcctgtgcactggcagtttagtgaacttgaccaacaccctatggataggtaagaac

SEQ ID NO: 20549 - DNA, 201 bp, Homo sapiens
ctaaaggccatgaaattatttttgatcaatatgtggcaaatacaattagctcagtgagacaaaaatgcccagtgactagtctaaaggacaacgtggaacayaatggaagaacacaaggcgttttaaagtctagatactggattgtcccacaaggtccttcaaaaataaaacacaggcatcttctttataattgaaacttga

SEQ ID NO: 20550 - DNA, 201 bp, Homo sapiens
gcatccagacatgaataacaaaaaccagtttttaattttttcagacaaatgcaagattattatctgatcattccaaaccaactgctgaaacggtagcaccygacaacactgcaatccccagtttaagggctgaagctgaagaaaatgaaaaagaaacagcagtatccacagaagacgattcccaccataaggtaaaagtaa

SEQ ID NO: 20551 - DNA, 201 bp, Homo sapiens
atcactgagacaacaagtattgccaatgaagaaggctttaatcaggtgctgcagctgaggagatgggagcacagtctcaaatccatctcactaactgactwaaactaggggtttacatagcaagggaaaaatgtaacaatgtgtaagaaaataagaactaggtaggggtaaggaaacaatcatggtgaataagcggtcagg

SEQ ID NO: 20552 - DNA, 201 bp, Homo sapiens
tcagcacatttgctcagttcttaaaataagaagctaaaggccatgaaattatttttgatcaatatgtggcaaatacaattagctcagtgagacaaaaatgyccagtgactagtctaaaggacaacgtggaacacaatggaagaacacaaggcgttttaaagtctagatactggattgtcccacaaggtccttcaaaaataa

SEQ ID NO: 20553 - DNA, 201 bp, Homo sapiens
aaagaaaatgaagtataaaggtataattttttttaatcaataaaacaggccaggcacagtggctcatccctgtaatcctagcactttagggggctgaggcrggcagatcactttgagctcaggagtttgataccagcctgggtatcatggcgaaaccctatctccaggaaaaaaaaaaaaatcaataggagagatgtaagg

SEQ ID NO: 20554 - DNA, 201 bp, Homo sapiens
ctatgtaccccatgaatatgtataattgttatttgtcaatttaaaaataaaattaaaaaagaaaatgaagtataaaggtataattttttttaatcaataaracaggccaggcacagtggctcatccctgtaatcctagcactttagggggctgaggcaggcagatcactttgagctcaggagtttgataccagcctgggta

SEQ ID NO: 20555 - DNA, 201 bp, Homo sapiens
atgttttataattttatcttttaattccatttctcaatgaactttttgaagtccccttatcacaattatcaaagctatgtaatattcattaaaaaaaaaaagctgctgtgaagatagcagaatatggctacaccacagctcccaagtttacatgttaaggtccagcttcccacagatactcctccaactttctcattcttg

SEQ ID NO: 20556 - DNA, 201 bp, Homo sapiens
gggtgcagcaaaccactatggcatgtgtatacctatgtaacaaacctgcacattctgcacatgtatctcagaacttaaagtataattaaaaaaaaaaaaaacggcagtgatcctgagctctggggagactgcaatgagcagagccctcctgccaacttgtattggacttgtagcaggattgcaaaattgacttctgtttct

SEQ ID NO: 20557 - DNA, 201 bp, Homo sapiens
ggatgtgaagaaataggaacgctttcatattgttggtgggagtaaattagttcaatcattgtggaagacagtgtggcaattcctcaaggatctagaactayaaataccatttgatacagcaatcccattactgggtatatacccaaagggttacaaatcattctactataaagatgcattcacacatatgtttattacagc

SEQ ID NO: 20558 - DNA, 201 bp, Homo sapiens
ttccaaacaatagaaaaagagggactcctccctagctcattttatgaggccagcatcatcctgataccaaaacctgaaggatatacaaaaaaaaaaaaaaattcaggccaatatcactgatgaacatggatgcgaaaatcctcaataaaatactggcaaaccaaatccaggagcacatcaaaaagcttatctaccacaatc

SEQ ID NO: 20559 - DNA, 201 bp, Homo sapiens
aatcaattgaacccaggaggcagagattgcagtgagctgagatcactccactgcactccagcctgggcaacagagtgagactccgtctgaaaaaaaaaaaatacttagggtgcatatccacggtctccagcagcattttcttcaagatcaaatagatgctggctgagaaattttgagagtctataatgaaaacagaaacca

SEQ ID NO: 20560 - DNA, 201 bp, Homo sapiens
ataaaaacattggggaaaaactcacatcagagttcttactagcaacactggaaattataagaaaatagaccaatgttttaaaaaaaattctgagaaaaaaatactccaatctagaattctatatctattcaaactatgtatcaagtaaagggtaaaatacagatatttttctaatatgcaataccttaaaaattctgtctc

SEQ ID NO: 20561 - DNA, 201 bp, Homo sapiens
agaaagaaaagacaaaaaatagaagggcaaaaatcattaaggaactaacacataaaatgctccccagaactgaaatatataaatttccaaattcaaagggmctaatgagttcctaaactaaatgtaaaagtatccaaactaaggcagagatggtaatatttcagaagactagggccaaatgtaaaaacataaaagcatcca

SEQ ID NO: 20562 - DNA, 201 bp, Homo sapiens
aaaaggtaggaaaatttctccttttatactatattcttgtttgattatttttaagttattgcgattattttccctttcttggttcccttttacagctttayaactaattattttttgcctcctactatcatttgttaagatgctcacacatagacctaaaatttctctaattcttgataatgtcttatttacaaaagcaaa

SEQ ID NO: 20563 - DNA, 201 bp, Homo sapiens
ggtcaagtgactacatctaaaacaatcaggtatggccagtagatgagaaccaggttgtaccaacatgactgctgggtacacccctatagatttagggtggsggaaggacagttcctgtgaagacagaaaacttgtgaatcaacatcccaaaagctgtcaaccttacccacaaatactttatttcgttggcagtttttatct

SEQ ID NO: 20564 - DNA, 201 bp, Homo sapiens
tttcagacaaatgcaagattattatctgatcattccaaaccaactgctgaaacggtagcacctgacaacactgcaatccccagtttaagggctgaagctgragaaaatgaaaaagaaacagcagtatccacagaagacgattcccaccataaggtaaaagtaacatcatttatattaatacaattttttaattctccaaag

SEQ ID NO: 20565 - DNA, 201 bp, Homo sapiens
ggaagaaataaattctcccagggaagctcatcacattgttattataaacccaagattttaggccaggtgcggtggctcacgcctgtaatcccagcacttcrggaggctgagatgggcggatcacctgaggtcaggagctcaagaccagcctggccaacatggcaaaaccccgtctctactaaaaaatacaaaaattagccg

SEQ ID NO: 20566 - DNA, 201 bp, Homo sapiens
aatatggccaaaataatgtctcccactataacacaggacagggtgtggtggaccctttctgaaggattggcaaatgtctgagaaaaagaacaggcaactgyctccctggatggatccatcccatctggagctctggaatgagacacagtgagattagtgagtggtatgataagacgagaaactctgaaaggcatgattaag

SEQ ID NO: 20567 - DNA, 201 bp, Homo sapiens
ggccacatctgtaaggcagaccaacagggaaaacctcactgtgtctgccaggatccagtgacttgtcctccaacaaaaccccttgatcaagtaagtattcygcaaaatagtctttaagtggctccaaaaggttagtgactgaaataaaaatatttgccattgaaatttttgcttaaaaaaggtagatacctaggttatcat

SEQ ID NO: 20568 - DNA, 201 bp, Homo sapiens; identical to SEQ ID NO: 5339

SEQ ID NO: 20569 - DNA, 201 bp, Homo sapiens
gatggtcaggaagcactcactgaatggtagttctgtgaaatggaggtgagggtcacagatgggagtgcatggatggtacacaggtgaagtgcttagcataraacctggcatatagtaaaatctcaggaatgtatatgccattgaatgagctactattaaatggtctaagacaaaaatgtactttttcaataaaataatact

SEQ ID NO: 20570 - DNA, 201 bp, Homo sapiens
cagagcattttctaaaaaaggggagcattttttagaataaaagagatttgagcactcctttcatttactcattcatttgctcaagaaatctttacaggccrggcgcggtggctcacgcctgtaatcccagcactttgggaggctgaggcgggcggatcacgagttcaagagatcgagaccatcttggctaacacggtgaaa

SEQ ID NO: 20571 - DNA, 201 bp, Homo sapiens
ctgctgaccaggcacagtggcaaagagggatggtcaggaagcactcactgaatggtagttctgtgaaatggaggtgagggtcacagatgggagtgcatggrtggtacacaggtgaagtgcttagcatagaacctggcatatagtaaaatctcaggaatgtatatgccattgaatgagctactattaaatggtctaagacaa

SEQ ID NO: 20572 - DNA, 201 bp, Homo sapiens
tctcctaggtatcaggcatttttaccagtaccatttcttctaactctcacaaaactgaattagatgttttattagtcaaggttctccagagaaacagaacmaataggagataggtaggtaggtaggtaggtagatagatagatagatagatagatagatagatagatagatgatagatagatagagatatagataatgagg

SEQ ID NO: 20573 - DNA, 201 bp, Homo sapiens
gcaattgtttcccatattaaatgtgttggccctcaccaaggtacatgagaagcttggaccacgatctgaatcctaaagggacttctgctgggactgaatgyttgcattagcggttcacacaagaactaaatgctcatcaaagtacaccattattccccagaaggtcccaacaccatgagaatgaggctacttggaactgtt

SEQ ID NO: 20574 - DNA, 201 bp, Homo sapiens
cttgaggggaaaagtcttttcccatggtgggaggagaagaattaacagctgtggaccagctgtgggcaagctgtgtcttttccttgcttgaaggcatcttyttaacattttctctctgaaggcataaataagcttccaggttttcaccctattttcaaagaacttttcaaactctagccttaaaatccattagggtttatt

SEQ ID NO: 20575 - DNA, 201 bp, Homo sapiens
ccttgcctttttctttcagagaatttttcacacagccattgagcaattagagtgctggcatttccttcctaggtcttttgagatttaatccccagtagctyctcatggcacagattcacatatcaactaagtaaaaataatagtgatgacagaaataaaatgaatagtgatgcatctggacaacttgaaaacattatttat

SEQ ID NO: 20576 - DNA, 201 bp, Homo sapiens
ttacaattgtctctcacaggtcatgctactggtctgtcctccacacagctgtcacacatacaaatctggttatatcatcacccctgtccacacatgtgtgyacacacacagacatacacacatgcgtgcacacacagacacttacaataattctttgggtccctatagctctatggctggaatttttaattccttgtttaa

SEQ ID NO: 20577 - DNA, 201 bp, Homo sapiens
tgataattcttactccccttttaagttgtaccatttgtaagaaaatagggtagcattccatgtgcctaattccactgttatgtgtgatgaatgtcggaaayactcctggcattaaaaggagcctaaatgtgtggccagaatggactttaatgttccactggacaatttttctgacctcacagcaaaacttaaattacatta

SEQ ID NO: 20578 - DNA, 201 bp, Homo sapiens
tcagtgttcagacagcttattaatgcttaagagaaaaggaaagagaaggaagatagaaagaagaagtacagcaaggcaagaagtgcccaggggagcaggtrtgctaagttgatttaagtggcatggcaatatacagaacttcaaaaataaaatttatcttttaaaatttaaatgtaaattaatgttctaaaaaactatagg

SEQ ID NO: 20579 - DNA, 201 bp, Homo sapiens
tttctctgagaaagagaaaatagtagcacagataccatagtaggacttgagcaaagaaaaataaatatggccaaaataatgtctcccactataacacaggrcagggtgtggtggaccctttctgaaggattggcaaatgtctgagaaaaagaacaggcaactgtctccctggatggatccatcccatctggagctctggaa

SEQ ID NO: 20580 - DNA, 201 bp, Homo sapiens
aggtatggatgactgcgtttacagtctggttcagtgttcagacagcttattaatgcttaagagaaaaggaaagagaaggaagatagaaagaagaagtacarcaaggcaagaagtgcccaggggagcaggtgtgctaagttgatttaagtggcatggcaatatacagaacttcaaaaataaaatttatcttttaaaatttaa

SEQ ID NO: 20581 - DNA, 201 bp, Homo sapiens; identical to SEQ ID NO: 5352

SEQ ID NO: 20582 - DNA, 201 bp, Homo sapiens
aatgtctataccccaaatacaacaaaaagttcagaaaaataaataaatgtaaatatgagaaaatcctgtgttctctttctctgagaaagagaaaatagtarcacagataccatagtaggacttgagcaaagaaaaataaatatggccaaaataatgtctcccactataacacaggacagggtgtggtggaccctttctgaa

SEQ ID NO: 20583 - DNA, 201 bp, Homo sapiens
ttttgtttactacatttcccagaaaggaaatttttccatagttgtaataattgctaaaaatagcagtctacaggcttcctctgatataaacaaattcaacmgaagatacctggccttatttggatgcatggatgtacatactccaggaaatgataggccaagagtaataagaaaaagaaagtaacaagacaaacctctcct

SEQ ID NO: 20584 - DNA, 201 bp, Homo sapiens
tgtatggaggctgcacaagtgaggggccttgaaactcaagcttcctagttttatggcacgtctatcctggccatattcaaatgtctataccccaaatacarcaaaaagttcagaaaaataaataaatgtaaatatgagaaaatcctgtgttctctttctctgagaaagagaaaatagtagcacagataccatagtaggact

SEQ ID NO: 20585 - DNA, 201 bp, Homo sapiens
aataaaaaagcaagcccatttctgacaatgggagatgtcagaacatctcagaatccattaccaacacactaaagactggattttacatcacaattagtgcygggataatcctttaacccaaaactcacccatggcttcaccctcaatgaatgggagctgtgggagggtagatcagagtattctttctttactcctgcagtg

SEQ ID NO: 20586 - DNA, 201 bp, Homo sapiens
cctggttgagataaacggaaacagttctcaaaacagtaatttatgaaaatagatattttatgagtacttgacacaagtctataattgctgagatatttaawaataaaattactaaccacattctattcaaatctctgtcacttctgtataatcactgtactccactgaatgtgtgtaaaatatgtatttgcagcttatagg

SEQ ID NO: 20587 - DNA, 201 bp, Homo sapiens
acacttgggatatttaatctatggttcacatacatatttaatatgttactttaatttaaatattttatacttattaacatgactttttcctttctcacatwtcatgaaacaattttgttaaaactcttcatacgcatctttaacaccaatgtgtatgttcactggatccacgctgtaattatctaatacagagcacatcat

SEQ ID NO: 20588 - DNA, 201 bp, Homo sapiens
accaaagtgtttggccaaacagcatgtacaaatgggtaatatattgtaatgtacacttgggatatttaatctatggttcacatacatatttaatatgttaytttaatttaaatattttatacttattaacatgactttttcctttctcacatttcatgaaacaattttgttaaaactcttcatacgcatctttaacaccaa

SEQ ID NO: 20589 - DNA, 201 bp, Homo sapiens
catcacaataatgaaaactgcataggaccaaacataaggtgcccccaaatacaatgccatcttcatctttctagtgagaacatcctcaaccaaagtgtttrgccaaacagcatgtacaaatgggtaatatattgtaatgtacacttgggatatttaatctatggttcacatacatatttaatatgttactttaatttaaat

SEQ ID NO: 20590 - DNA, 201 bp, Homo sapiens
aaaacttgtgaatcaacatcccaaaagctgtcaaccttacccacaaatactttatttcgttggcagtttttatctgtattctatttatatcacatatacarcaaccttatgggagaaaaatgtccttggtgagcctgagagttaaatcttcatgcacaagctactcaattaataggatgccatgtatttcattgcagagtc

SEQ ID NO: 20591 - DNA, 201 bp, Homo sapiens
aactgctgtcatgaagacctgttgttgctaagaggtcagatggttcaagagaaactggaaatttggattttgacatgaaacctctggaatttaaaatactrgtttaaaatgcacagtgcctaccaaaccaaacctatctgcaggccacccctaactcacagattgccagtaaagacctctaaatcagatgaacattaatac

SEQ ID NO: 20592 - DNA, 201 bp, Homo sapiens
agtattaaaacatcttatctttcattaactttttattacgtttctgtttcagttcctccagtgttttctaggtcatgcaattatgaaaataagttagcatktttatcttacatctcaaacaactaatgtattcagtgttctatcccatgcaaaattccagaaatgcagcaaggagcaaaactagagaggggctgagctctt

SEQ ID NO: 20593 - DNA, 201 bp, Homo sapiens
cataagatcattgtattttttttttttttgagacagagtcttgctctattgcccaggctagagtgcagtgacatgacctcagctcactgcaacctccaccwcctgagttcaagtgattcttgtgcctcagcctcctgagtagctgggactacaggcatgtactaccatgcctggctgatttttgttgttttagtagagatg

SEQ ID NO: 20594 - DNA, 201 bp, Homo sapiens
caacccatttggacgtctcatacgttttctaaatctgatctgtagctccatctgttaggtgagtattgttgcaggtttattgtcctcagctttctgaactrtaaactattttagaaaaaacagcttcagaaacaatgagagtttgaatatctgccaacaaacatttccaaataaagctatactgaaaagacaccgcgaatt

SEQ ID NO: 20595 - DNA, 201 bp, Homo sapiens
catccctgtaatcctagcactttagggggctgaggcaggcagatcactttgagctcaggagtttgataccagcctgggtatcatggcgaaaccctatctcyaggaaaaaaaaaaaaatcaataggagagatgtaaggtaaaagtgagaaagtttcccagaatgatagacacactgttgaagagaagagcaaaaatgattag

SEQ ID NO: 20596 - DNA, 201 bp, Homo sapiens
ggcagaggttatagtgaaccaagattgcgccattgcactccagcctgggcaacagagcaagactctgtattaaaaaaaaaaaaaggaaaaaaaaaaacttyatttgctgagttagaaccaaagacccacaaagacccacaggaattcctatgtgtcacactaaaaatgatgatgataatgacagaggaaaatatgaagaaa

SEQ ID NO: 20597 - DNA, 201 bp, Homo sapiens
attaccatatataaaatattttattttaatacaataaaaatcatggaatatattttagtgggtttagtagtttaaggggaaaagatagcagcaatttaggrttcatacaattaatggaattattttcaattttagaatcctaaaatattagggttagaggatcatctaggtctcactcttcattgttcatcacttgagaaa

SEQ ID NO: 20598 - DNA, 201 bp, Homo sapiens
ttttcaatgattctttacaattagcattcactaggaggatagaatgttttaaattatcatcgctaatagagtccacatatttactttaagcatgaattacyatatataaaatattttattttaatacaataaaaatcatggaatatattttagtgggtttagtagtttaaggggaaaagatagcagcaatttaggattcat

SEQ ID NO: 20599 - DNA, 201 bp, Homo sapiens
cttaataataacatgataaagttgtttttctttcaaaatccaattccagaatacagtgatttggtttgaaactcacaaggtaagttaatttgaattaagtrcgatttttaaaacataaaaatgtctcctttcagaaccaatggaccaataaaaggccagttgatttcctttattgaatctgaatttactcatattgtgctg

SEQ ID NO: 20600 - DNA, 201 bp, Homo sapiens
atatttgtggaataaatgaataaataagtaaacattgaatttaaaatgtagaggaaagaaactgcgtttttcaatgattctttacaattagcattcactargaggatagaatgttttaaattatcatcgctaatagagtccacatatttactttaagcatgaattaccatatataaaatattttattttaatacaataaaa

SEQ ID NO: 20601 - DNA, 201 bp, Homo sapiens
aatattttagaatagtgaaaagtgattttaacaccaaggtaaggaaaccacctcaatatctactaaaaaattttgtttgaaaataatattcattttgaaaygaaaaatatttaataagagaaaatctcaaaccttaaatttctgtatcatttaaggctcttacatgtacagctagctcatctattatagaggcacgttaat

SEQ ID NO: 20602 - DNA, 201 bp, Homo sapiens; identical to SEQ ID NO: 5353

SEQ ID NO: 20603 - DNA, 201 bp, Homo sapiens
tggatggtttaattaatgcaggtctccttcactaactgaagaagccaatgaagtttgtctacattatatattgcacaaattggcaggatatttaaatatgyttttatttttatacgcatctgtgaagaatctgaattgaacagtaagaattagaaaactatcttttgaatgactgaatatagacctattcataaagaaatt

SEQ ID NO: 20604 - DNA, 201 bp, Homo sapiens
ggtaagaatttttttttttatgagcaatgcattcttgatttttctacccaatattaaaatgatttctgctctatttcattggatggtttaattaatgcagktctccttcactaactgaagaagccaatgaagtttgtctacattatatattgcacaaattggcaggatatttaaatatgtttttatttttatacgcatctg

SEQ ID NO: 20605 - DNA, 201 bp, Homo sapiens
tattaaaatgatttctgctctatttcattggatggtttaattaatgcaggtctccttcactaactgaagaagccaatgaagtttgtctacattatatattrcacaaattggcaggatatttaaatatgtttttatttttatacgcatctgtgaagaatctgaattgaacagtaagaattagaaaactatcttttgaatgac

SEQ ID NO: 20606 - DNA, 201 bp, Homo sapiens
tcttacattaggaagaatccactatctcactaatggaagaaaagattctttgagtgctgttctctgaaacacaccaaaaagatccagaaatgtttccttcmctctttaactgaaaaatgactttttttgttgtttacagtaagaaaatggcagcgtgtaatgataacttccagatctgaaaatgttaaattctaggagatg

SEQ ID NO: 20607 - DNA, 201 bp, Homo sapiens
aaactcatatagtataaaactataatactactttttcttaacttagatgtaaaccttaaagataaattcttctgtttgttaacacctttcagacttatgtrtatgaaggagtagaagccaaaaggatctttaaaaaggattgagcattattcttggcgcacagtccaaaatacaaattggacagaagatctatattgtacc

SEQ ID NO: 20608 - DNA, 201 bp, Homo sapiens; identical to SEQ ID NO: 5358

SEQ ID NO: 20609 - DNA, 201 bp, Homo sapiens
tgctctatttcattggatggtttaattaatgcaggtctccttcactaactgaagaagccaatgaagtttgtctacattatatattgcacaaattggcaggrtatttaaatatgtttttatttttatacgcatctgtgaagaatctgaattgaacagtaagaattagaaaactatcttttgaatgactgaatatagacctat

SEQ ID NO: 20610 - DNA, 201 bp, Homo sapiens
gtacagaacgagaattaagaattaataagaataagaattaattaattgcttgacatagagtagttaggtgatttcctgaactttaagcttccacatcacartatgaagttggttcaagataagaaatataataaattctcgcccaaggacagacctgaatctctagctgcctagaggctgactcaactgaaatcatggcgt

SEQ ID NO: 20611 - DNA, 201 bp, Homo sapiens
ggtttgttacatatgtacacatgtgccatgttggtgtgctgcacccattaactcgtcatttaacattaggtatacctcctaatgctatccctaccccctcyccccaccccataacaggccccggtgtgtgatgttccccttcctgtgtctaagtgttctcattgttcaattcccacctataagtgagaacatgcggtcttt

SEQ ID NO: 20612 - DNA, 201 bp, Homo sapiens
atcattttcaacaaattttttaaaaactttttttagcctcaacatttttctatttaaattacatgtttgtaatgacaatttaactactgaatgttttatcrtaagttatgtctttctttaattagtaccacaatcacacaaattaaaacaagcacagagttgttaacatctccatgaaactaattttaaccatgactatat

SEQ ID NO: 20613 - DNA, 201 bp, Homo sapiens
tttttaaaaactttttttagcctcaacatttttctatttaaattacatgtttgtaatgacaatttaactactgaatgttttatcataagttatgtctttcyttaattagtaccacaatcacacaaattaaaacaagcacagagttgttaacatctccatgaaactaattttaaccatgactatatttctggacacgtaaca

SEQ ID NO: 20614 - DNA, 201 bp, Homo sapiens
aaagataaattcttctgtttgttaacacctttcagacttatgtgtatgaaggagtagaagccaaaaggatctttaaaaaggattgagcattattcttggcrcacagtccaaaatacaaattggacagaagatctatattgtaccagaactatttatttcaccccatcaagtataaggttactgattgattggtccttttat

SEQ ID NO: 20615 - DNA, 201 bp, Homo sapiens
catgtttgtaatgacaatttaactactgaatgttttatcataagttatgtctttctttaattagtaccacaatcacacaaattaaaacaagcacagagttrttaacatctccatgaaactaattttaaccatgactatatttctggacacgtaacatgaaagattcagaaagaagtgctgctcatctgccttaaaattcag

SEQ ID NO: 20616 - DNA, 201 bp, Homo sapiens; identical to SEQ ID NO: 5356

SEQ ID NO: 20617 - DNA, 201 bp, Homo sapiens; identical to SEQ ID NO: 5355

SEQ ID NO: 20618 - DNA, 201 bp, Homo sapiens
gacaatttaactactgaatgttttatcataagttatgtctttctttaattagtaccacaatcacacaaattaaaacaagcacagagttgttaacatctccrtgaaactaattttaaccatgactatatttctggacacgtaacatgaaagattcagaaagaagtgctgctcatctgccttaaaattcagcgtatggaaatt

SEQ ID NO: 20619 - DNA, 201 bp, Homo sapiens
ttctaactcctaaatctctaggagattacagatagcttacagatagctcctgatgtggtagagaggatccagaagatgttcagaggagggaaaccatattytcccttcttacattaggaagaatccactatctcactaatggaagaaaagattctttgagtgctgttctctgaaacacaccaaaaagatccagaaatgttt

SEQ ID NO: 20620 - DNA, 201 bp, Homo sapiens
tacaggtgttaatatagtgaaaaggaagcttgcagctcatgacaatttgaagctgacaattacacaagaaggaaataaattcacagtcaaagaatcaagcrcttttcgaaacattgaagttgtttttgaacttggtgtcacctttaattacaatctagcagacggaactgaactcagggtaagaatttttttttttatgag

SEQ ID NO: 20621 - DNA, 201 bp, Homo sapiens
cttattcttattaattcttaattctcgttctgtacattcctgagatcttctgaaattcaactgaattaaaacatgagaagcatacctattctgtcttaaaytacagtttgtgggcatacttatttcaagaattagaatgcatgccgtctgaagattgtttttctaagttcaaagtgcagactatgttggaggtaatataat

SEQ ID NO: 20622 - DNA, 201 bp, Homo sapiens
taaacgtatggtagagtgaaaagaacatgtgttttagaaacaagacccattgacttgggtttcagtgctgactaaacatacattactctgcagaatcttcrtcacattacttactcaatctctctgagcctcagttttctcatcaataaaatgaagacaataataatacctgatatgtatattttatgaacaaattacata

SEQ ID NO: 20623 - DNA, 201 bp, Homo sapiens
caccatttatatcctttctagaattaaatttccactatttattagtattggagaacagcctattatttgttaagtgacttccatttcaacaaccgtttttygggaaaaccaaccttgtcattacaccaccctgcttggccaaaagagggtccctgacccaagagcagccaatctaccacaatttggccagatcatgagctc

SEQ ID NO: 20624 - DNA, 201 bp, Homo sapiens
gaaaaacaaaggggcatttaagaaaaaagaatactgtatatgtggaattaaagatgtgcttccttataaatatatgaatatacattttaatccttcatttratatttctagaatttgatttacttaacactgaaatgaacagtttgttaatcttattaaggttgctcagctctaagattctataattctgtactctactta

SEQ ID NO: 20625 - DNA, 201 bp, Homo sapiens
ttaagaattaataagaataagaattaattaattgcttgacatagagtagttaggtgatttcctgaactttaagcttccacatcacagtatgaagttggttyaagataagaaatataataaattctcgcccaaggacagacctgaatctctagctgcctagaggctgactcaactgaaatcatggcgtttgacagcacttgg

SEQ ID NO: 20626 - DNA, 201 bp, Homo sapiens
catactctgtagcccaatggcctaggttcaatcctcactctgtgactttaggtgaatcactgtgccattttacagtctcctcttctgcaaagtagagatartagtatcagtttcatagggtcaccatgaagattaaatgaaaaagtgtgtctacagaactcagaacagtgcctgacatgtgtaagaccctaataaatgcca

SEQ ID NO: 20627 - DNA, 201 bp, Homo sapiens
agctctaagattctataattctgtactctacttaatttttctcaagttatggaaaaacaactttaatcagttctcttgatcggattgaacctgaacttctrtagaagcaatctgaatgttcttgtgcaaaggcaatgctaccgagttttcttcccaccctcaaaataaacaaacaaaacataacttggaaaaataaacact

SEQ ID NO: 20628 - DNA, 201 bp, Homo sapiens
tgacaattacacaagaaggaaataaattcacagtcaaagaatcaagcgcttttcgaaacattgaagttgtttttgaacttggtgtcacctttaattacaayctagcagacggaactgaactcagggtaagaatttttttttttatgagcaatgcattcttgatttttctacccaatattaaaatgatttctgctctatttc

SEQ ID NO: 20629 - DNA, 201 bp, Homo sapiens
tctctgggctctgtctcatcctctgggaaatgggggagctgcttcttcctcaagctccccaggggtgtagatgaggccagtggtggcctgtgtctaccacytcacctcactgaatcctgagagtcctgggaaggccaagcccacctgtctcacaagtagcaagctgcttcatgccgtgccttgtagttagggcatctggcc

SEQ ID NO: 20630 - DNA, 201 bp, Homo sapiens
ctcccacatgcctgccacaggaagtctggctcttcatcacaggtcctttgtccagagccatctgccctcctctcggtggccggctagtgctacattccatrttgcagatgaggaaactgagggtcagagaagtgcaaggtcttaccctggtttttcagccacagccagtagaacaataaactgctgtacactgagggccaa

SEQ ID NO: 20631 - DNA, 201 bp, Homo sapiens
agggacaaggaacagggccaggtaagaggtgcttttctgtgccagaggctacagcaggcattacagaaggatgtcatgtagccctttgctgtggcatcatwcccatttgacagataggaaagttgaggctaagagaggaaggtgacttgtctagagtctccatgtcatagaactaggccttctgaacctcagtggctggct

SEQ ID NO: 20632 - DNA, 201 bp, Homo sapiens
aagggagttggaagcaagtttctgtggggagcaggaggaggttgcctggtgttccttcggaggaagctttttggggtccattcctggagtgtatggctcayagccagtcccagtgtgcccccacccccagacctcattggcctaagtagctggagtaggtgacaggcagcccagggccctccacgatgtgggggacagctt

SEQ ID NO: 20633 - DNA, 201 bp, Homo sapiens
cagtgcgctgaagctgaggcccagagtacacctggcctgtgtcctgagtgttcacacacccaccaagcatccaggggcaactcctggtgcctcagccatcrggggctgtcccttccctgaggcccaggcccctccatctccctccaggatccttcggttcccatggcagttggtgcaggagcaggtgcggcagacgatggc

SEQ ID NO: 20634 - DNA, 201 bp, Homo sapiens
taatgaacaagacagggacagggagaagagaccttgatatgtgggagaccctgcacaaggcgcttctcttttctaggcctgaaagctcccttctagctgcracttctgttttaccatttaaagcctgaagattttgttgggtagctagaggggcggtgggtgatgggaactgtagggactggcaagggcagattcccaagc

SEQ ID NO: 20635 - DNA, 201 bp, Homo sapiens
tcatgccacagcccagcctgccatacatagctgtggtttctgcatccgtaggctcaactaacctcgggtagaaaaaacaatgtttaaaaaaaggatgcggmcgggcgcagtggctcgtgcctgtaatcccagttctttgggaggccgaggtgtgtggatcacctgaggtcagaagtttgagaccagtctggccaacatggt

SEQ ID NO: 20636 - DNA, 201 bp, Homo sapiens
cgtcagcgtcaacgccagcgcctgcgcactgagggcggcctggtcgtcgtctgcggcggcggcggcggctgaggagcccggctgaggcgccagtacccggyccggtccgcatttcgccttccggcttcggtttccctcggcccagcacgccccggccccgccccagccctcctgatccctcgcagcccggctccggccgcc

SEQ ID NO: 20637 - DNA, 201 bp, Homo sapiens
cctgccagcagcctcaggcctccccgctgtggcgtgcccgacccatctgatgggctgagtgcccgcaaccgacagaagaggttcgtgctttctggcgggcsctgggagaagacggacctcacctacaggtaggggcctgggagcaggacactaggatgccacctgtgtgtccgtgggtaagccagctgccctcacagctgc

SEQ ID NO: 20638 - DNA, 201 bp, Homo sapiens
gtgcccatccctgggcacagcctgacaggcaggagtagggcccagtgtccactcgcccaggcttgaccaccttctcttctcaggctatgcctacttcctgygcggccgcctctactggaagtttgaccctgtgaaggtgaaggctctggaaggcttcccccgtctcgtgggtcctgacttctttggctgtgccgagcctgc

SEQ ID NO: 20639 - DNA, 201 bp, Homo sapiens
actcgaggaactcagcagtggccaagggcttcccactcagccctcccttagtgcccatccctgggcacagcctgacaggcaggagtagggcccagtgtccrctcgcccaggcttgaccaccttctcttctcaggctatgcctacttcctgcgcggccgcctctactggaagtttgaccctgtgaaggtgaaggctctggaa

SEQ ID NO: 20640 - DNA, 201 bp, Homo sapiens
ggtcctcctccttcaggcctcacttcgttgcttttcccctgggctcagttccagtcctggctgtaagactgggaaagccactgcttgagtcaggacctcaktggctatttttgtccgtgagaagtcctctacaccacgacttgggaggcagcctgggagaaagagaaattagtcgtggctcctttaaggggtccgcggagg

SEQ ID NO: 20641 - DNA, 201 bp, Homo sapiens
ctgggtattagcccagcccagattccggggcaggcagaagggctccctagagggaagagaggttctgaaaggccggccctggatcctgcaggactcgaggractcagcagtggccaagggcttcccactcagccctcccttagtgcccatccctgggcacagcctgacaggcaggagtagggcccagtgtccactcgccca

SEQ ID NO: 20642 - DNA, 201 bp, Homo sapiens
cggggcatggcagtggtggctgggcaggtccttgcagccttccctctccggcaggtgctcagtactgggtgtacgacggtgaaaagccagtcctgggcccygcacccctcaccgagctgggcctggtgaggttcccggtccatgctgccttggtctggggtcccgagaagaacaagatctacttcttccgaggcagggact

SEQ ID NO: 20643 - DNA, 201 bp, Homo sapiens
gggttggggatctgctcgagagacttcccagagccaggaatgttatggccaagggcaggaacagacagatggatccttagggacacagtggatagggagarctgccccaaagcctgggggccgagggagagagagtgtggtttgttcctcaggcacaggtaggaggttctcggaggtggctcttgagataggagcagcgtg

SEQ ID NO: 20644 - DNA, 201 bp, Homo sapiens
tgctttctggcgggcgctgggagaagacggacctcacctacaggtaggggcctgggagcaggacactaggatgccacctgtgtgtccgtgggtaagccagytgccctcacagctgctgcttgagacacaggccagggtagatcttcgtgtctaacagacctgtgtgtccactgaaccccagggaggtcatctatgggcaaa

SEQ ID NO: 20645 - DNA, 201 bp, Homo sapiens
gcgggcgctgggagaagacggacctcacctacaggtaggggcctgggagcaggacactaggatgccacctgtgtgtccgtgggtaagccagctgccctcayagctgctgcttgagacacaggccagggtagatcttcgtgtctaacagacctgtgtgtccactgaaccccagggaggtcatctatgggcaaaccccctgaa

SEQ ID NO: 20646 - DNA, 201 bp, Homo sapiens
tggcctcaagggagaggccgggaagcctgcctctaagtgacagtgaactcaagaccagtggactaggacccttcccgggcagagtcctgggctgaagcaayggtgaatacacgcggacactcctcactggacacttgggcagctccctgtgtggcctcgagataatcctgcctcagtttctcttggacccgctgctcacct

SEQ ID NO: 20647 - DNA, 201 bp, Homo sapiens
acttcccagagccaggaatgttatggccaagggcaggaacagacagatggatccttagggacacagtggatagggagagctgccccaaagcctgggggccragggagagagagtgtggtttgttcctcaggcacaggtaggaggttctcggaggtggctcttgagataggagcagcgtggaagggattgcacggtggggcc

SEQ ID NO: 20648 - DNA, 201 bp, Homo sapiens
tttgacgcttgtgcatggtcagtgctggagctgggggccagcttggggtggggtctgagctggactgtggtctgtcactctgcaaacacgcagggagcatktggggtcacctctgatgtgtttatcccccggctgccttcagcaaggctgggagagctctgtaaatatttatccagcccagttcccagctttcagggttga

SEQ ID NO: 20649 - DNA, 201 bp, Homo sapiens
aagctaccgtccctcctggagccagcagcagaggggtgagaataggaagattaggtggaagcttgagggagaagatatccctgcttgccacctggctgtgygagttgggcaggttgcttgacctctctgagcctgcatggtgatgctcccgtcttcctccatagcctaacaagtgccctcctcgaagtcttgcctcccacc

SEQ ID NO: 20650 - DNA, 201 bp, Homo sapiens
gggctgaagcaacggtgaatacacgcggacactcctcactggacacttgggcagctccctgtgtggcctcgagataatcctgcctcagtttctcttggacycgctgctcacctgctggacagcaggctgggagggctccgagctccccccgctgaaggctccggtcagggcgctgcccatgacgtgtcccacagccgagcc

SEQ ID NO: 20651 - DNA, 201 bp, Homo sapiens
ggggttgcacgtgtgtttgctgacaggccacatctctaactgtgggccatgtggaccttaggcctgaccagaccctcatgtcatcctcctgcctaggacgyccaccacctccatgccgagaggagggggccacagccctggcatgcagccctgcccagtagcccggcacctgcccctgccacgcaggaagccccccggcct

SEQ ID NO: 20652 - DNA, 201 bp, Homo sapiens
gtggtggctgggcaggtccttgcagccttccctctccggcaggtgctcagtactgggtgtacgacggtgaaaagccagtcctgggccccgcacccctcacmgagctgggcctggtgaggttcccggtccatgctgccttggtctggggtcccgagaagaacaagatctacttcttccgaggcagggactactggcgtttcc

SEQ ID NO: 20653 - DNA, 201 bp, Homo sapiens
gtgagcaggtctgggagtcaggccttgctcaggccctgttcttctcccttgcagcttctgtctggccccaaagagacccctgctgcccagagccccaccaraggcccctctgacaccaagagagcaggtgagggtcccagcaggggtagtcacaggcatctttcttcccctccccctgcctccctttccctgcctagaaaa

SEQ ID NO: 20654 - DNA, 201 bp, Homo sapiens
gaactggctgcagtgagtagcggggggtggaacatgcgggtgagaaggtgagtgtgagccctggctcagctcatgtgtgcaggcaggcgtgagcacaagtktatctgtggattgcatgtgctaatggcagtacgtccacacacgcttctggaaaaacagagatgtttgtgggcatggagcatgtactgattgtggcgtcgc

SEQ ID NO: 20655 - DNA, 201 bp, Homo sapiens
agctaggggccagcgagatggcggacgaggccttagctgggctggatgagggagcccttcggaagctggtaagtggccccatcacccactgtggggacagraaagccaagccagagaggcagggtcaatccagggtacctctcagctgacaggaagaagtgatgggggaaaggtcaggaggagggggacatgggaacaggg

SEQ ID NO: 20656 - DNA, 201 bp, Homo sapiens
ccccatagtgggccacgggggaccagagtcctgggaaagtcaaggctggacgaggccataagagagagacaggttttgtgggcccttatggattctgtggyttctcatctcatttttctactcttgagtctcagttcctctacctgtaaaatgaagggagggagggagatgtgtttgcacacaagctctaggtcctagagt

SEQ ID NO: 20657 - DNA, 201 bp, Homo sapiens
tggaagaagcttcagagagaggctgcctttgcatcatggtacagctcgggaaacaagcccagtctgggatagggatgaccctaggggcacgtggcacatcrgcagcagacccagaaccctctcactcatcctaaattcttgtaaggtctcaaatgagatagagaataactgtcctgttctaaagagggggaaacagtcata

SEQ ID NO: 20658 - DNA, 201 bp, Homo sapiens
gcggcaagaatgtctagcctgcccgcccgcatggccagccagtggcaagctgccgcccccactctccgggcaccgtctcctgcctgtgcgtccgcccaccrctgccctgtctgttgcgacaccctcccccccacatacacacgcagcgttttgataaattattggttttcaacgatcctgactcctctctgcgtctcctgg

SEQ ID NO: 20659 - DNA, 201 bp, Homo sapiens
acacaggccacacattgtgccctaggcagagccgtgggcagctggtgccagccctccgcccctggcagccaaaatgacctgcctctcgcacccactgcagstggaggtcacagcagatctggcagagcggcggcgcatccgctcagccatccgggaactgcagcggcaggagctggagcgcgaggaggaggccctggcatc

SEQ ID NO: 20660 - DNA, 201 bp, Homo sapiens
ataggcacaacccactcactccagagtggggaaaaggctttgccaacacccagaactgggggcctgggtcccatgcggcctagcctgcacttactaagccrtggggcttgaaacaaatggctcctctgctctgtgactcagtttccttatctgtgaagggcagctagcattctgaaggatggccagaagggtggtcccccc

SEQ ID NO: 20661 - DNA, 201 bp, Homo sapiens
aaaaaaaaaaaaaaagtttgaccttcctcctgaggacaacaggagttataaagggtttccaaacagagaagggatggatatagcattctaggaccttcctyggatgaggcttggatgagagatgggatggactagatgactggaatagcttaagagctagagagacaggcttcccaatagatctggtttggagagggagag

SEQ ID NO: 20662 - DNA, 201 bp, Homo sapiens
tcctaacccctgctcggggccccacggtgagaaacgccgcctctcccacctgccccgtttcaccagaatctgctcagcaaggccagagagggtccagggakgcgggtgggggaagtaaggggggcatttagtcaagccagaggagccagacatagccctgtcttctggcagttcagggcccagcaggtgagaccattctaa

SEQ ID NO: 20663 - DNA, 201 bp, Homo sapiens
agcatgcctgattcatgtctgtcccctgcagaattctctgagctggtgacaggtgccacaggcactggggatctcaccagaaaggaaccgacggagctagrggccagcgagatggcggacgaggccttagctgggctggatgagggagcccttcggaagctggtaagtggccccatcacccactgtggggacaggaaagcc

SEQ ID NO: 20664 - DNA, 201 bp, Homo sapiens
tgccttcctggaaggcttttccctgtctggagtttatgaaagaccagcaggcaatgcggcaataaaaaagaccttggggtagaggggcgccacgagaggcrggtctggcgctgacatccaaccccgtgccccctccctgcaggatgctggtggactgtgtgcccctggtggaggtggacgacatgatgatcatgggcaaga

SEQ ID NO: 20665 - DNA, 201 bp, Homo sapiens
agcaaccctaggatctgcttccctatccattggagacatgatgagtttcacccatacccctgcttaaagtccatgccctctccccaccctgcagatggaascagagccagcagagcctctcgctgcagcagtggaagcggccaatggggctgagcagacccgagtgaacaaagcaccagaagggcggagccctctgagcgc

SEQ ID NO: 20666 - DNA, 201 bp, Homo sapiens
tagattccagaatcagtgatgaagtaacagggcctcttgggtggtgggcagggttcaaggccggatcccactcttggagtcccctccttgttgctctgtakgaggccctgagtcaatttctctaaatgagggaaggagtgatgaggcatgaccatagccttagctgggtggcgctgggcctctcagtagctctgtcccttg

SEQ ID NO: 20667 - DNA, 201 bp, Homo sapiens
acaggatcagaatccaggatgagaaccaaaggggtccagagactctgaatcagagagaccttgttcaagttctagttccgcccatcacgtcctctgaaatsttaggcaagttactgccagaggtctcagtttcctcacctttagtggaattggtaaggcccctccctgctcttgtgaagtttaaaatggcacacaggaaag

SEQ ID NO: 20668 - DNA, 201 bp, Homo sapiens
tcttaggcaggatagcccaggcttgttcacataacagctgcgagagttccaagagaataagtggaatctcttaaggcccaatctcttaacacccaggcttygaactggcaatgccacttccgtatattctattggccaaaaatagtcacatgcctgcctgggcatggtggctcacacctgtgtaattccagcactttggga

SEQ ID NO: 20669 - DNA, 201 bp, Homo sapiens
agtttcgtgaggcgctcggagagtaaggccacctggtgtcgccctgtgcctgcctgcctgtccgcccacctcctccggctcttccttgagctctctctccrtgtcttcaactgtgccgtcactttctcttctctgcctgcggctatcaccacccctccatacagcctcccatcccatctcctgatgtccagcccaggccct

SEQ ID NO: 20670 - DNA, 201 bp, Homo sapiens
ctgttaccaagactgagcggctcgtccactccagtaaggggccaaatggggccggcccagggctcagggtgggaacacatcctcccccagccccctgtgcmtttcacatccttctcatcccctgcccctgcagatgatggcacacggacggcccgcaccaccacagtggagtcgagtttcgtgaggcgctcggagagtaag

SEQ ID NO: 20671 - DNA, 201 bp, Homo sapiens
caacatgcagtgtcaacttggacaaatgacttcccctctctgagcctcagtttctttgcccataaaagggacagaacattagcatctgctttatagggctrtggtgatggttacatgagtgcatggtatgccataggcactcaatatgtgtcagttatttcatgcttaagtgtgccaggccctgaggaggaaacaaagttt

SEQ ID NO: 20672 - DNA, 201 bp, Homo sapiens
ctgggctttctctgaaggaccctgactgggtggagggttagccagggtgacttagggatgcaacacagacagcttggtaaaatagtcattctcagacttgrgctctggagcaaaatattacccctagcctctgagctgctccagccacttcccattctgcctttccagggttgaacctggaagaacctagagtagaccctt

SEQ ID NO: 20673 - DNA, 201 bp, Homo sapiens
acgagacactgaagcccagtgaggtcataaagcaagtcaggtgcaggctagactctcagcctaggctagactctcagcctagggatccttcccccctcccygccccagtcattgggaccatgttgcccactccccaagaggctcagggggaacagagctagggacctcttccttcaaactcacctcctttaggcggttcag

SEQ ID NO: 20674 - DNA, 201 bp, Homo sapiens
gtgatggttacatgagtgcatggtatgccataggcactcaatatgtgtcagttatttcatgcttaagtgtgccaggccctgaggaggaaacaaagttttgrgaggttgagaatctgggatgcagaatggctctgctcctgatttgctacactacctgaagcctgtcccttgtcctctctgggactcagttacctatttgaa

SEQ ID NO: 20675 - DNA, 201 bp, Homo sapiens
tgattaagaacaaatgttctggccgggcgcagtggctcacgcctgtaatcctagcactttggaaggtcaaggcaggcggatttcttgaacccaggagttcragactagccccggcaacatagggagacccttgtctctacaaaaaataaaaaaattagccaggcatggtggcacgtgtctgtagtcccactgtgagcctgg

SEQ ID NO: 20676 - DNA, 201 bp, Homo sapiens
gactcagctaccccctcactagatctagatacccctcctgacttagctactcatgcctatagaaaccctttttggatccatacccctttgagtttagctaytccgtattctctagtttctgcctgagtccatcaaacccttcccacactccattccctgtcaagttatggctgtcccctcaccccagctgctcctagagag

SEQ ID NO: 20677 - DNA, 201 bp, Homo sapiens
tccctgctgctcctctctccctgaagtccattgatggccatcttagcctctgccccatccagcttcccttttcctggacacaactacttcctcccccagayagttcttccctggacacatctattcattcccttagattctgggttcaattgcttctcctctcaaacactctcaattactcctctgaatctagctgcttct

SEQ ID NO: 20678 - DNA, 201 bp, Homo sapiens
  misc_feature (1)...(201): n = A,T,C or G, or insertion/deletion polymorphism (see Tables 1-2)
atgatgagtttcacccatacccctgcttaaagtccatgccctctccccaccctgcagatggaaccagagccagcagagcctctcgctgcagcagtggaagnggccaatggggctgagcagacccgagtgaacaaagcaccagaagggcggagccctctgagcgctgaggagctgatgactattgaggatgaaggagtcttg

SEQ ID NO: 20679 - DNA, 201 bp, Homo sapiens
tgtattaatacaattcggggtacgtgggaagccctacaacaaaactgtcagtgcctcttccctgactgacgctgacatggccatctttgggcaggcaggckggcaggctagtggttatttccaaggcgtgccagcaaccctaggatctgcttccctatccattggagacatgatgagtttcacccatacccctgcttaaag

SEQ ID NO: 20680 - DNA, 201 bp, Homo sapiens
gagttaggctgccttcagctcagatcccaggctgcatcacacttagagagagactgtgggcaagtcagttagctgccctgagcctcagtttccccttctggttttttttttttttttccggtcttgttttctttgcaacagggtcttactctcttgcccagactggagtgcagctgcgtgatcatagctctctgcagcctc

SEQ ID NO: 20681 - DNA, 201 bp, Homo sapiens
ccctgccaacgctccctgtcggtgctcagcccccgccaaccagcccagaaccgaggtactacctattctcaccctgcctaggatctgtgcagaccctgtcscacccagttgctgacagccctcctgttccttctagagtccaccccccttgccagcggaccttcctcattccagcgggctggctctgtgcgggatcgtgtc

SEQ ID NO: 20682 - DNA, 201 bp, Homo sapiens
agctgaggttccaggcagcccagagccaccccccagcccacccaagaccaccagccctgagcctcaggagtctccaacgctccccagcactgagggccagktggtcaacaaggtgagtctggatgaggggcagggatgccaggcaagtgagcaggtctgggagtcaggccttgctcaggccctgttcttctcccttgcagc

SEQ ID NO: 20683 - DNA, 201 bp, Homo sapiens
gccgggcacaatggctcatgcctgtaatcccggcactttgggaggcccaggtggtcagatcacttgaggtcaggggttcaagaccagcctggccaacatcwtgaaaccccgtctctactaaaaatacaaaaattaaccgggtgtggtggcaggagcctgtaatcccagctacttgggaggctgaggcaggaggattgcttg

SEQ ID NO: 20684 - DNA, 201 bp, Homo sapiens
cagaggccccacagtggggtaacttgaacacagtggttcagagcctggtctctgtcaagaagatatggtgctgggaacagtggtgtgtccctgtggttcgygctcctcggaaggctgaggcaggaggataagcctagggattcttgagcccaagagttctaggctgtagtgtactatattgatcgagtgtctgtgctaagt

SEQ ID NO: 20685 - DNA, 201 bp, Homo sapiens
caccctggcttcttccatggtggctaggtccaggccagtgcagtggggacaatagccctcagccaggcaggactcctgagcacctgtcctcagtttccccrtctgtggatgaagcagtcaacccccagctgggctgtggtgtttggtgactagaccagggagcctcccttgctcagagggtggacttcatctgtcaccttt

SEQ ID NO: 20686 - DNA, 201 bp, Homo sapiens
taatcccagctacttgggaggctgaggcaggaggattgcttgaacccgggaagcagaggttgcagtgagctgagatcacgccattgcactccagcctgggygacagagtgaaactctgtctcaaaaaaaaaaaaaaaaagaaaagaaaacgatttaagcctgagtgcagtggctcactcctgtaatcccaatactttggga

SEQ ID NO: 20687 - DNA, 201 bp, Homo sapiens
cagacccacactggaggcttatctctgccactatcttccaggggaaccctgggccagtcctctctcccttgagccacggaggatctgtatgtagcaggtgrctctacatggtggaggtgtgggggaggcaacaggattggctgactcactccagagaaggtgttctttcctgaacctggttagaccagtcacccccaattt

SEQ ID NO: 20688 - DNA, 201 bp, Homo sapiens
acaggcatctttcttcccctccccctgcctccctttccctgcctagaaaatgggctcttgtgcctggcagctctagcttcctcaggtccatgcagtccctsatactgcaccccacccctgaagtgtccccgcccccagctaggccagcctccccctccacccccatggctagaggcctcccctgcagccttgaaaggcaac

SEQ ID NO: 20689 - DNA, 201 bp, Homo sapiens
cccaggctagagtgcaatggcatgatctcggttcagtgtagcctcaacctcctgagctcaagcgatcctcctgcctcagcttcccagagtagtgggattayaggcatgcaccactgttgattctttatagatgttaattctctgcttaacacacatgcccctccaactcccaccacacatacagacacagacacacataca

SEQ ID NO: 20690 - DNA, 201 bp, Homo sapiens
gggggtggggacagaggaaatcaccccgcctttactggctcccgtctggttatcagacccacactggaggcttatctctgccactatcttccaggggaacmctgggccagtcctctctcccttgagccacggaggatctgtatgtagcaggtggctctacatggtggaggtgtgggggaggcaacaggattggctgactca

SEQ ID NO: 20691 - DNA, 201 bp, Homo sapiens
gctcaagcgatcctcctgcctcagcttcccagagtagtgggattacaggcatgcaccactgttgattctttatagatgttaattctctgcttaacacacaygcccctccaactcccaccacacatacagacacagacacacatacacacgcacgcacgcatgcacgcatgcacgccagccccacaacaggaggaatgtaac

SEQ ID NO: 20692 - DNA, 201 bp, Homo sapiens
attacaggcatgcaccactgttgattctttatagatgttaattctctgcttaacacacatgcccctccaactcccaccacacatacagacacagacacacatacacacgcacgcacgcatgcacgcatgcacgccagccccacaacaggaggaatgtaacggaagcaatgctttgtgttctgtaacctgtttccttttcct

SEQ ID NO: 20693 - DNA, 201 bp, Homo sapiens
ttacaggcatgcaccactgttgattctttatagatgttaattctctgcttaacacacatgcccctccaactcccaccacacatacagacacagacacacatacacacgcacgcacgcatgcacgcatgcacgccagccccacaacaggaggaatgtaacggaagcaatgctttgtgttctgtaacctgtttccttttcctg

SEQ ID NO: 20694 - DNA, 201 bp, Homo sapiens
ctcccaccacacatacagacacagacacacatacacacgcacgcacgcatgcacgcatgcacgccagccccacaacaggaggaatgtaacggaagcaatgytttgtgttctgtaacctgtttccttttcctggacacacaggaaggtcatgttctcatttttcctgcagttagtagagtcacgtgactacataaaggccag

SEQ ID NO: 20695 - DNA, 201 bp, Homo sapiens
ctccaagagggccaacccttacctagggttggagccaggggtaagacacccatcacccttcttgcctcctgacccaaggcctgggctttctctgaaggacmctgactgggtggagggttagccagggtgacttagggatgcaacacagacagcttggtaaaatagtcattctcagacttgagctctggagcaaaatattac

SEQ ID NO: 20696 - DNA, 201 bp, Homo sapiens
atacgtgacccctgcgcaaaggcagttaagtgtggatgtgcctcctttgattttctgattccctttccacatgcagaggattcaggaatagattccagggraagcctggggtggaggcaggattcgggggcaaggtcactgcttggaaaagagctccctgggagagccccaacctgtatcagactttgcaggggtgagaaa

SEQ ID NO: 20697 - DNA, 201 bp, Homo sapiens
gttaagtgtggatgtgcctcctttgattttctgattccctttccacatgcagaggattcaggaatagattccagggaaagcctggggtggaggcaggattsgggggcaaggtcactgcttggaaaagagctccctgggagagccccaacctgtatcagactttgcaggggtgagaaataaactctgattgggttaaaccac

SEQ ID NO: 20698 - DNA, 201 bp, Homo sapiens
ggtcttgccaggccctggcttctcaatccaggtccctgccctccctgttttgaggtttagacaggatgagagtccatcccaggccacacagcagactggcrgccaagctggcagggctggaaccagagaccccctaccctgggtttggtgagttttccagcaaaccaccctagggcagagggcagcttccagccaggagcc

SEQ ID NO: 20699 - DNA, 201 bp, Homo sapiens
tatcagactttgcaggggtgagaaataaactctgattgggttaaaccactgagatatttggtttgttacagcagtcagcattaattacactgaataaaacwgtgtatcagttatcaattgccacaacaatgctacataacaaaccaccccaaaacttagtgccttaaaacagcaaccgtttttttagctcaagatttcatg

SEQ ID NO: 20700 - DNA, 201 bp, Homo sapiens
gtggatggtagaatatggtgattaagaacaaatgttctggccgggcgcagtggctcacgcctgtaatcctagcactttggaaggtcaaggcaggcggattkcttgaacccaggagttcgagactagccccggcaacatagggagacccttgtctctacaaaaaataaaaaaattagccaggcatggtggcacgtgtctgta

SEQ ID NO: 20701 - DNA, 201 bp, Homo sapiens
cgccctgtgcctgcctgcctgtccgcccacctcctccggctcttccttgagctctctctccgtgtcttcaactgtgccgtcactttctcttctctgcctgyggctatcaccacccctccatacagcctcccatcccatctcctgatgtccagcccaggccctcacctggtgccccttccccttttttgcagatggcagtgg

SEQ ID NO: 20702 - DNA, 201 bp, Homo sapiens
caggcaggtgatgtgacttgccaaggctgcatagctagggagcagtgatgtccccaccgtactcaagtttgtctgtttccagaagctaaggtcttagcctytctacagttagaaagtcctaggtttgagtctcgactctgtccattatagctgtgtgaccttgggcaagtcacttttctctctgggcctcattttttttct

SEQ ID NO: 20703 - DNA, 201 bp, Homo sapiens
catagtgagactctgtctctaaaagtaaataaataggctgtgcgcagtgggctcacgcctgtaatcccagcactttaggaggccaaggcaggcggatcacytgaggtcaggagttcaagaccagcctggccgatatggcgaaaccctgtctttactaagaatataaaaattagctggtcatgatgtcatgtgcctgtggtc

SEQ ID NO: 20704 - DNA, 201 bp, Homo sapiens
aggcggatttcttgaacccaggagttcgagactagccccggcaacatagggagacccttgtctctacaaaaaataaaaaaattagccaggcatggtggcaygtgtctgtagtcccactgtgagcctgggaggtcaaggctgcagtgagccatggttgtgccactccactccagcctgggcgacagagtgagactctgtctc

SEQ ID NO: 20705 - DNA, 201 bp, Homo sapiens
gctcaagcggccctccagccccagcctccagagtagctgggactacaggtgcacaccaccacacctagctatagttttcaaaatttagatataattcatawataaattatattttatagttattttggtgtttaattttgaaataattttagacttacagaaacgttgcaaaaatagttcagagttatcctaaactcttca

SEQ ID NO: 20706 - DNA, 201 bp, Homo sapiens
ggaaggtcaaggcaggcggatttcttgaacccaggagttcgagactagccccggcaacatagggagacccttgtctctacaaaaaataaaaaaattagccrggcatggtggcacgtgtctgtagtcccactgtgagcctgggaggtcaaggctgcagtgagccatggttgtgccactccactccagcctgggcgacagagt

SEQ ID NO: 20707 - DNA, 201 bp, Homo sapiens
cagagggaggctcccattttccagatggggacactgaagctccgggggttgtgctgtagaggtggccaagttcctacatcaggcttttgtcagagacaagsaccccatctccgagcccagagcactgagaatggggacctaggagacaaaaggctagcccttgcccctctgggcctctttaccctctgtacagaaggggct

SEQ ID NO: 20708 - DNA, 201 bp, Homo sapiens
agaaataagtgggagaagtagggattgccttcctccaataataatgctttggccctaaaaaggaaactcttgaaccccatagaatattttattttattttwttttttttttgagacagagtctcgctctgtcgcccaggctggagtacagttgcacgatcttggctcacgcaacctctacctcccagattcaagcaattct

SEQ ID NO: 20709 - DNA, 201 bp, Homo sapiens
gggagaatttcactgggcagtttcggaaaccgccccatccccttccccttccccctcggtagacaatggcgctttgtacttccttccctccctcccacagytccctccttacacagcggtggggcctgggcgggtggaactcgggacacacagaggagacactgtggtccaacctttgcctccaggcccaaagggaagggt

SEQ ID NO: 20710 - DNA, 201 bp, Homo sapiens
taagtgggagaagtagggattgccttcctccaataataatgctttggccctaaaaaggaaactcttgaaccccatagaatattttattttattttattttwtttttgagacagagtctcgctctgtcgcccaggctggagtacagttgcacgatcttggctcacgcaacctctacctcccagattcaagcaattcttgtgc

SEQ ID NO: 20711 - DNA, 201 bp, Homo sapiens
gcccccgctggcctcgtggcaagaacgggggcgtcccgagccgggctcctccccgcggggccgggccatataaggaaaagctaggcccgctccgcccgccmtgcgccccagcgtctggccgatttggggacgcgggcagtcgcttccggccccggctcccgcacattcttgaggattgggccggggatgggaggaatgggg

SEQ ID NO: 20712 - DNA, 201 bp, Homo sapiens
atgttggccaggatgatcttgatctcttgacctcgtgatcctcccccttaggcctcccaaagtgctgggattacaggcataagccaccacgcccggcgcamctgcttcttcttctttttttttttttttttttgagacgagtccccctctgttgcccaggctggagtgcagtggcacgatcttggctcactgcaagctctg

SEQ ID NO: 20713 - DNA, 201 bp, Homo sapiens
tacctgtaaaatgaagggagggagggagatgtgtttgcacacaagctctaggtcctagagttggcatggggacagaatgaggcatggacccagatctcagktggaggaaagatgagcccactccatcccctttcttgttcctcttcctgagagccctgtctacctccatgcacagaggccgtagggcaacccagtggggca

SEQ ID NO: 20714 - DNA, 201 bp, Homo sapiens
gaaggaggggttattatacgtctgattgaatcaacttccaggatccttattggtccttggtggtaactagggcgctctcttccaggatccttattggtccttggtggtaattaggccactctcgcttcaaagtcccaaattcaggcgccccgctggggactagagcgaccgttccccacctcacccaccccaagctcagag

SEQ ID NO: 20715 - DNA, 201 bp, Homo sapiens
ggggccagccgggctgctggcgcggctggacgggcagctctccgcagaatccaggggacggttgctgagcgggcctgggacagcgggtcgcggcacctccsgcctgcgcgtgtctaatccgtctgtcgggtcccgaaagagctaagccgagcctgcgccggacgggtgggctggactgagaggtgggtgtgcggacctcgg

SEQ ID NO: 20716 - DNA, 201 bp, Homo sapiens
gaggcggggtttgcccccacctggccccgctccagaaggaggggttattatacgtctgattgaatcaacttccaggatccttattggtccttggtggtaaytagggcgctctcttccaggatccttattggtccttggtggtaattaggccactctcgcttcaaagtcccaaattcaggcgccccgctggggactagagcg

SEQ ID NO: 20717 - DNA, 201 bp, Homo sapiens
tgggcctttcccctctccccatccaaaccccacttctcccttacccttcatacttcactcacgttggtcttccatcagtttctggagattgttcctgcctygggacatttgcgtagtctgttccccttgcctggaacacccccacccccacgtcgagaccaacttagatttttgttcaacaatttcttatcttccagactt

SEQ ID NO: 20718 - DNA, 201 bp, Homo sapiens
tgagagataactcctctgacctcccagaactacctgttcaaaacaaaactttaaaaattatttaagccagccgggcacaatggctcatgcctgtaatcccrgcactttgggaggcccaggtggtcagatcacttgaggtcaggggttcaagaccagcctggccaacatcatgaaaccccgtctctactaaaaatacaaaaa

SEQ ID NO: 20719 - DNA, 201 bp, Homo sapiens
gaaaccaggagtttgagaccagcctggacaacatggggaaactccatctctataaaaattagtcaggtgtggtggtgagtgcctgtagtcccagctactcrggaggctgaggtgagaggatcacctgagcccagacaggtcaaggctgtagtgtgccatgatcgcaccactgcactccagcttgggtgacagagatcctgt

SEQ ID NO: 20720 - DNA, 201 bp, Homo sapiens
ccagaactacctgttcaaaacaaaactttaaaaattatttaagccagccgggcacaatggctcatgcctgtaatcccggcactttgggaggcccaggtggkcagatcacttgaggtcaggggttcaagaccagcctggccaacatcatgaaaccccgtctctactaaaaatacaaaaattaaccgggtgtggtggcaggag

SEQ ID NO: 20721 - DNA, 201 bp, Homo sapiens
tggccgggcgcagtggctcacgcctgtaatcctagcactttggaaggtcaaggcaggcggatttcttgaacccaggagttcgagactagccccggcaacayagggagacccttgtctctacaaaaaataaaaaaattagccaggcatggtggcacgtgtctgtagtcccactgtgagcctgggaggtcaaggctgcagtga

SEQ ID NO: 20722 - DNA, 201 bp, Homo sapiens
tcccagcactttgggaggccaagaagggcggatcacctgaggtcaggagttcaagactagcctggacaacatggtgaaatcctgtctctactaaaaatatrtaacttagccaggcgtggtggtgcacaccagtaatcctagctactcactactcgggaggctgaggcaagagaatcgcttgaacccaggaagcggaggttg

SEQ ID NO: 20723 - DNA, 201 bp, Homo sapiens
gttttaaagggaccaagtccttttaggggagcttctgatcatttgaatctccaataacagaagaggttttcaaatgttaccccggggattcctcattgccygctcccagtattttccaagaaagacctgaggctcctttctgagcttcattcccttgttctcctcccagcccctcagctgtcttttgtaccaattaggtag

SEQ ID NO: 20724 - DNA, 201 bp, Homo sapiens
aaatgttctggccgggcgcagtggctcacgcctgtaatcctagcactttggaaggtcaaggcaggcggatttcttgaacccaggagttcgagactagcccyggcaacatagggagacccttgtctctacaaaaaataaaaaaattagccaggcatggtggcacgtgtctgtagtcccactgtgagcctgggaggtcaaggc

SEQ ID NO: 20725 - DNA, 201 bp, Homo sapiens
atatgtaacttagccaggcgtggtggtgcacaccagtaatcctagctactcactactcgggaggctgaggcaagagaatcgcttgaacccaggaagcggargttgcagtgagctgagattgtgccattgcactccagcctgggtgacaagagtgaaactgtctcaaaaaacaacaacaacaacaacaacaacaacaaaaca

SEQ ID NO: 20726 - DNA, 201 bp, Homo sapiens
agaatcgcttgaacccaggaagcggaggttgcagtgagctgagattgtgccattgcactccagcctgggtgacaagagtgaaactgtctcaaaaaacaacaacaacaacaacaacaacaacaaaacacaggtgctggaagagaggagtcctaacgttgggggctattgtgagaattgactgagggaatgcaccgtggaaac

SEQ ID NO: 20727 - DNA, 201 bp, Homo sapiens
tgccattgcactccagcctgggtgacaagagtgaaactgtctcaaaaaacaacaacaacaacaacaacaacaacaaaacacaggtgctggaagagaggagycctaacgttgggggctattgtgagaattgactgagggaatgcaccgtggaaacgtgtgctgtaaattacctattttattacacccaaggtgggcttaata

SEQ ID NO: 20728 - DNA, 201 bp, Homo sapiens
gtggaaacgtgtgctgtaaattacctattttattacacccaaggtgggcttaatagctgtcagggagtgttagtattatctcaaccaaacccccaatttayagaggagaaaacaagagcctcaggcaggtgatgtgacttgccaaggctgcatagctagggagcagtgatgtccccaccgtactcaagtttgtctgtttcc

SEQ ID NO: 20729 - DNA, 201 bp, Homo sapiens
gacacccatcacccttcttgcctcctgacccaaggcctgggctttctctgaaggaccctgactgggtggagggttagccagggtgacttagggatgcaacrcagacagcttggtaaaatagtcattctcagacttgagctctggagcaaaatattacccctagcctctgagctgctccagccacttcccattctgcctttc

SEQ ID NO: 20730 - DNA, 201 bp, Homo sapiens
aggtggatcacctcagttcaggagttcaagaccagcctggccaacatgtcaaaaccccgtctctactgaaaatacaaaaattagccaggcgtggtgacggrcccttgtaatcccagctacttgggaggctgaggcaggagaatcacttgaagccgggaggcaggggttgcagtgagccaagattgcgccactgcactctag

SEQ ID NO: 20731 - DNA, 201 bp, Homo sapiens
agagtgagactctgtctcaaaaacaaaacaaaacaaaaaaaaaacaacaaaagaacgagggttctgagcctgtctccttatctgtataatggtggtcctayctcacaggactcaagctgtgaaggtcatagtggtaacaaaattgccacacatgtagtataagcatgatcaggagccagtgtccaacccatcaggtagcaa

SEQ ID NO: 20732 - DNA, 201 bp, Homo sapiens
aagttctgaaccctgttggaggccaatatgagaccatgggggaccccaggccccaactggcagtggctccaggcactgcctccgtgccatttggctattaytaggcccggcgtcctcatctcaaatccagatggggatcgagaagggcgggtagggcagggcctggctggcggaaggctgggaacacggcttggaggctgg

SEQ ID NO: 20733 - DNA, 201 bp, Homo sapiens
ttggctctgaggttgttgcagagcactccctcccaccgtggccgcctcctctgggaagatgcagagcccttctgcagcctcagcacttttctccctgcccyagagaggccaggcctgcgtggaaactctgaattggacactgcgtgccttcagaaccggcaaaggagccatccaccccgctgtctacaggtcttcatgcct

SEQ ID NO: 20734 - DNA, 201 bp, Homo sapiens
cctcctctgggaagatgcagagcccttctgcagcctcagcacttttctccctgccctagagaggccaggcctgcgtggaaactctgaattggacactgcgygccttcagaaccggcaaaggagccatccaccccgctgtctacaggtcttcatgcctccagtgaggcttactggatctgctgagggggaagggcctatata

SEQ ID NO: 20735 - DNA, 201 bp, Homo sapiens
caaatggtggatggtagaatatggtgattaagaacaaatgttctggccgggcgcagtggctcacgcctgtaatcctagcactttggaaggtcaaggcaggmggatttcttgaacccaggagttcgagactagccccggcaacatagggagacccttgtctctacaaaaaataaaaaaattagccaggcatggtggcacgtg

SEQ ID NO: 20736 - DNA, 201 bp, Homo sapiens
gttacagttttttgccctaggagggcctgaaggaggcgagtcaaaccccctcattttacagatgggcagactgaggcccaggtctccccagtgctcaggcktcatccaagtggagcttccaaatggtggatggtagaatatggtgattaagaacaaatgttctggccgggcgcagtggctcacgcctgtaatcctagcact

SEQ ID NO: 20737 - DNA, 201 bp, Homo sapiens
atccaagtggagcttccaaatggtggatggtagaatatggtgattaagaacaaatgttctggccgggcgcagtggctcacgcctgtaatcctagcactttrgaaggtcaaggcaggcggatttcttgaacccaggagttcgagactagccccggcaacatagggagacccttgtctctacaaaaaataaaaaaattagcca

SEQ ID NO: 20738 - DNA, 201 bp, Homo sapiens
catccaagtggagcttccaaatggtggatggtagaatatggtgattaagaacaaatgttctggccgggcgcagtggctcacgcctgtaatcctagcacttyggaaggtcaaggcaggcggatttcttgaacccaggagttcgagactagccccggcaacatagggagacccttgtctctacaaaaaataaaaaaattagcc

SEQ ID NO: 20739 - DNA, 201 bp, Homo sapiens
cggccgggtgagctgcagaagtgggctgggcagtggggggcggggcttgataggcagtggggggcggggcttgatagttggcccggcagaggcgggaagaycgcgcggctagatctgtggtgcaaaggcccgaaggtcatggaaggcggggcctgggatccactgggtgggcccaccgaggcatgccccttatagtcgtgt

SEQ ID NO: 20740 - DNA, 201 bp, Homo sapiens
tccagaactctctccttcctgttccagccccttgcctctcctttgtctgtgaggctgggtctcctggaattcactgctgcccagtgggcatctgaggcccyttctcctcctgcagggccagaagtttgcctggcactgttgcccagagaacacagcggctggatgacatcctggagatgatggccttgccaaactggtttc

SEQ ID NO: 20741 - DNA, 201 bp, Homo sapiens
gcgagggcattatcaaccttgtctggcactgccctcactccacctgatcctcctgacagccacctttctccccactcagaactgacactggggctgcgggygcccccgaccctactcagcaccagtagtgggggcaagagcaccatcacccgtgtcaacagccctgggaccctggctcggctgggcagtgtcactcatgtc

SEQ ID NO: 20742 - DNA, 201 bp, Homo sapiens
tggcccttttgcgcatgcatggggcatcccctgcccagaccagcgggacaaggagcgggaacggcggctgcaggaggcacggggccggccaggggaggggygcggcaacacagccactgagaccaccacgaggcacagccagcgggcagctgatggctctgctgtcagcactgttaccaagactgagcggctcgtccactc

SEQ ID NO: 20743 - DNA, 201 bp, Homo sapiens
ggttcaaatcccttcgctaccaccaacatgcagtgtcaacttggacaaatgacttcccctctctgagcctcagtttctttgcccataaaagggacagaacrttagcatctgctttatagggctgtggtgatggttacatgagtgcatggtatgccataggcactcaatatgtgtcagttatttcatgcttaagtgtgccag

SEQ ID NO: 20744 - DNA, 201 bp, Homo sapiens
tgttacagttttttgccctaggagggcctgaaggaggcgagtcaaaccccctcattttacagatgggcagactgaggcccaggtctccccagtgctcaggygtcatccaagtggagcttccaaatggtggatggtagaatatggtgattaagaacaaatgttctggccgggcgcagtggctcacgcctgtaatcctagcac

SEQ ID NO: 20745 - DNA, 201 bp, Homo sapiens
tctccccagtgctcaggcgtcatccaagtggagcttccaaatggtggatggtagaatatggtgattaagaacaaatgttctggccgggcgcagtggctcaygcctgtaatcctagcactttggaaggtcaaggcaggcggatttcttgaacccaggagttcgagactagccccggcaacatagggagacccttgtctctac

SEQ ID NO: 20746 - DNA, 201 bp, Homo sapiens
gcgcagtggctcacgcctgtaatcctagcactttggaaggtcaaggcaggcggatttcttgaacccaggagttcgagactagccccggcaacatagggagmcccttgtctctacaaaaaataaaaaaattagccaggcatggtggcacgtgtctgtagtcccactgtgagcctgggaggtcaaggctgcagtgagccatgg

SEQ ID NO: 20747 - DNA, 201 bp, Homo sapiens
aattagccaggcatggtggcacgtgtctgtagtcccactgtgagcctgggaggtcaaggctgcagtgagccatggttgtgccactccactccagcctgggygacagagtgagactctgtctcaaaaacaaaacaaaacaaaaaaaaaacaacaaaagaacgagggttctgagcctgtctccttatctgtataatggtggtc

SEQ ID NO: 20748 - DNA, 201 bp, Homo sapiens
aagtctaaagaggtccaggctggcacatccagaactctctccttcctgttccagccccttgcctctcctttgtctgtgaggctgggtctcctggaattcaytgctgcccagtgggcatctgaggccccttctcctcctgcagggccagaagtttgcctggcactgttgcccagagaacacagcggctggatgacatcctgg

SEQ ID NO: 20749 - DNA, 201 bp, Homo sapiens
acacagcggctggatgacatcctggagatgatggccttgccaaactggtttcccagcaggtcctcagtcccactccgagggctgctggccatgacctaggrcgcatccagttctgcacataaggaggaaggtcataccccttggatccagccaaccccaacaagaaccatccacctctaggggctccattctccagcctca

SEQ ID NO: 20750 - DNA, 201 bp, Homo sapiens
tttgccctaggagggcctgaaggaggcgagtcaaaccccctcattttacagatgggcagactgaggcccaggtctccccagtgctcaggcgtcatccaagyggagcttccaaatggtggatggtagaatatggtgattaagaacaaatgttctggccgggcgcagtggctcacgcctgtaatcctagcactttggaaggtc

SEQ ID NO: 20751 - DNA, 201 bp, Homo sapiens
gaccctttctgtgacagccccttgccctaggaaggcttgaagcagaccagtctaatcacctcattttacagggggcaggctgaggcccaggcctctctggygcccacaagatacattcatcctgctcatctggcattcagaatccttggcaaagagaaccacccacatttcctgctccgcccacagcctatcctcctcctt

SEQ ID NO: 20752 - DNA, 201 bp, Homo sapiens
ggcttgaagcagaccagtctaatcacctcattttacagggggcaggctgaggcccaggcctctctggtgcccacaagatacattcatcctgctcatctggyattcagaatccttggcaaagagaaccacccacatttcctgctccgcccacagcctatcctcctccttttcccagactattggtctttgctcacactgttc

SEQ ID NO: 20753 - DNA, 201 bp, Homo sapiens
tcagaatccttggcaaagagaaccacccacatttcctgctccgcccacagcctatcctcctccttttcccagactattggtctttgctcacactgttcctmtgccacaaatgccctttcatgcctttccccctcttctatgtgggatgaattttaaaaattagctgggcgtggtggtgtgtgcctgtagtcctagcctctt

SEQ ID NO: 20754 - DNA, 201 bp, Homo sapiens
acagagcgagactctgtcttaaaaaaaaaaaaaaaaaggaatagtcttagccagtgggggtagggtgaggaataagtaagttactgtgggctaagctttarcccagtgcccagcacatattataaacttcataagcagttgctattttaaagggtttttgttttgttttgttttgtttttgtttttgtttttgagacaagg

SEQ ID NO: 20755 - DNA, 201 bp, Homo sapiens
agtaattacagtacagagtaattttggggagcttcagatacgtgctctgggaagacctttctaaggaggtgatgtgtgagttaagatctgaatggtaatcyggagccagccagagtgaagatgtggttgaagagcacagtcccaggggagaagaaagcaaaggcagaggccaggggagagaaagcagcatggcctctctca

SEQ ID NO: 20756 - DNA, 201 bp, Homo sapiens
atttccgatcgtcagtgctgtgatggggagtaattacagtacagagtaattttggggagcttcagatacgtgctctgggaagacctttctaaggaggtgaygtgtgagttaagatctgaatggtaatctggagccagccagagtgaagatgtggttgaagagcacagtcccaggggagaagaaagcaaaggcagaggccag

SEQ ID NO: 20757 - DNA, 201 bp, Homo sapiens
gggagatgtgtttgcacacaagctctaggtcctagagttggcatggggacagaatgaggcatggacccagatctcaggtggaggaaagatgagcccactcyatcccctttcttgttcctcttcctgagagccctgtctacctccatgcacagaggccgtagggcaacccagtggggcagggctccttccccaaccccaaag

SEQ ID NO: 20758 - DNA, 201 bp, Homo sapiens
tggctggctgaccaaggggtcacatgcatccttcagggaaaggtgttttgtgaatccagtggttcatttgttccacacgtgtgttgagccccttcgttgaygccagatcctttctaggtcctggggaccgtgttgagcgagacaaacccaagtccctggcttctcagagctcacagtctagcaggagacaaacaacaaaaa

SEQ ID NO: 20759 - DNA, 201 bp, Homo sapiens
ctcaggcgtcatccaagtggagcttccaaatggtggatggtagaatatggtgattaagaacaaatgttctggccgggcgcagtggctcacgcctgtaatcytagcactttggaaggtcaaggcaggcggatttcttgaacccaggagttcgagactagccccggcaacatagggagacccttgtctctacaaaaaataaaa

SEQ ID NO: 20760 - DNA, 201 bp, Homo sapiens
tgggatgcgctgaggcggaggaggggcggggtcagcaggctgggcctcgcctctggcctcgcccccagcccacctcccacggcctcacctctagttcctcstagcggcggcccagcagcacgagctcagggtcggccccagggaggtgtttcatcaccaggttgtgactggaggtggtgttaaggagcggggtggtgggca

SEQ ID NO: 20761 - DNA, 201 bp, Homo sapiens
tcctgacttagctactcatgcctatagaaaccctttttggatccatacccctttgagtttagctattccgtattctctagtttctgcctgagtccatcaamcccttcccacactccattccctgtcaagttatggctgtcccctcaccccagctgctcctagagaggcccttgttacctgtgtcattcatgtttctaacaa

SEQ ID NO: 20762 - DNA, 201 bp, Homo sapiens; identical to SEQ ID NO: 5377

SEQ ID NO: 20763 - DNA, 201 bp, Homo sapiens
cccctgccgatgcccacccgactcgctaaagccaccgaggcagacgaccccaagactcccaatttccgacctccctggcccgcgaggggcggggccttccyctcggggcgtggccgtcaaattgaattttcccaatggggcacgagagtgggaggtacccaatcgagggttggctggcgcgtcggggcagggcggggccag

SEQ ID NO: 20764 - DNA, 201 bp, Homo sapiens
gctgctaggccccttgaaaacagagcaggggggcctgtggcacgttcagaggagcctggtgccccgctgcccgtggccgtcggcactgccgagccaggggrcagtatgaagaccacattcaccatcgagatcaaggacggccgtggccaggcctccacaggccgggtgctgctgcccacaggcaaccagagggcaggtagg

SEQ ID NO: 20765 - DNA, 201 bp, Homo sapiens
tgggacacagggagtggacacaggccacacattgtgccctaggcagagccgtgggcagctggtgccagccctccgcccctggcagccaaaatgacctgccyctcgcacccactgcagctggaggtcacagcagatctggcagagcggcggcgcatccgctcagccatccgggaactgcagcggcaggagctggagcgcgag

SEQ ID NO: 20766 - DNA, 201 bp, Homo sapiens
ctgggaggtcaaggctgcagtgagccatggttgtgccactccactccagcctgggcgacagagtgagactctgtctcaaaaacaaaacaaaacaaaaaaamaacaacaaaagaacgagggttctgagcctgtctccttatctgtataatggtggtcctacctcacaggactcaagctgtgaaggtcatagtggtaacaaaa

SEQ ID NO: 20767 - DNA, 201 bp, Homo sapiens
ttccctgactgacgctgacatggccatctttgggcaggcaggctggcaggctagtggttatttccaaggcgtgccagcaaccctaggatctgcttccctayccattggagacatgatgagtttcacccatacccctgcttaaagtccatgccctctccccaccctgcagatggaaccagagccagcagagcctctcgctgc

SEQ ID NO: 20768 - DNA, 201 bp, Homo sapiens
cgaagtttcctctgggggcttcgcgggcgcccacacgtactcggggggcacctgcgcgtcgggcgccgccttgcggtagaagccgagctcctgcactagckcattgatctcttcgcgggtcatttcactgagtgggatgcgctgaggcggaggaggggcggggtcagcaggctgggcctcgcctctggcctcgcccccagc

SEQ ID NO: 20769 - DNA, 201 bp, Homo sapiens
gcattctgaaggatggccagaagggtggtccccccgagcatggcatagatggtccattggtattggctgggatcctcatctgcctcctctgctctacccawggcaggtgataagggttagagaacccctctgctgcccacacgttccctggcctccatctccagcagcagggttatccccaccccctgtcaaagaataggg

SEQ ID NO: 20770 - DNA, 201 bp, Homo sapiens
tccgcccacagcctatcctcctccttttcccagactattggtctttgctcacactgttcctctgccacaaatgccctttcatgcctttccccctcttctaygtgggatgaattttaaaaattagctgggcgtggtggtgtgtgcctgtagtcctagcctcttgggaggctgagatggaaggattgcttgagccaggagttt

SEQ ID NO: 20771 - DNA, 201 bp, Homo sapiens
ccgcccacagcctatcctcctccttttcccagactattggtctttgctcacactgttcctctgccacaaatgccctttcatgcctttccccctcttctatrtgggatgaattttaaaaattagctgggcgtggtggtgtgtgcctgtagtcctagcctcttgggaggctgagatggaaggattgcttgagccaggagtttg

SEQ ID NO: 20772 - DNA, 201 bp, Homo sapiens
tgagatggaaggattgcttgagccaggagtttgaggccatggtaagctgtgatcatgcgactgcactccagcctgtgggacacagcaagaccctgtctccaaaaaaaataaaataaaataaaaacaagtgtgacacacagtttatacaccacttccctaagaagtcttccagagcttcccccatcctagtggcagcaaagt

SEQ ID NO: 20773 - DNA, 201 bp, Homo sapiens
ctgcacttcgtgagctccgacaaaggaagagaggtagagagccagttgccctaccctagatccagctgccccattccccagctgctcccctcatactctgrggtccatttgtggacaccccagcttaataactgccctacccagcttctccttctctagacccagcagttcccttggctattccctgctggatccagctgc

SEQ ID NO: 20774 - DNA, 201 bp, Homo sapiens
tcatttgagactcagtgtactcctctaaaatgcgtgtgatgaggacgcctccctccctggcaggcgtttgtggcagtggagatactagtgtgctacaagacccccccctcctcctcgcgagtggtggtccaggctggggagcagccctgctctccctgcctaacatgcgcctccccaacccctagcatcttcgaccgcgag

SEQ ID NO: 20775 - DNA, 201 bp, Homo sapiens
cctcagcctcccaggcgcgcaaggccatgattgagaagctggagaaggagggcgcggccgggtgagctgcagaagtgggctgggcagtggggggcggggcktgataggcagtggggggcggggcttgatagttggcccggcagaggcgggaagaccgcgcggctagatctgtggtgcaaaggcccgaaggtcatggaaggc

SEQ ID NO: 20776 - DNA, 201 bp, Homo sapiens
tgtgtgtgtgtgtatgtgtgtgtgtctctgtttcctcccctctctcttctctgcctcttccctctcttccccacccggggccctggcctcctgcccccgtmccccaccccttcccggccccctaccctccccaggacccatgcggactgcccgcagctcctggatacagaggacatggtgcggcttcgagagcctgactgg

SEQ ID NO: 20777 - DNA, 201 bp, Homo sapiens
cctcagctgtcttttgtaccaattaggtagttattaattgctccctaattgcaaattggctgcctccttactggctcccacccatgctggctggctgaccmaggggtcacatgcatccttcagggaaaggtgttttgtgaatccagtggttcatttgttccacacgtgtgttgagccccttcgttgacgccagatcctttc

SEQ ID NO: 20778 - DNA, 201 bp, Homo sapiens
cctactccctgttgttagaagaccggaggcggggtttgcccccacctggccccgctccagaaggaggggttattatacgtctgattgaatcaacttccagsatccttattggtccttggtggtaactagggcgctctcttccaggatccttattggtccttggtggtaattaggccactctcgcttcaaagtcccaaattc

SEQ ID NO: 20779 - DNA, 201 bp, Homo sapiens
acacccctcctactccctgttgttagaagaccggaggcggggtttgcccccacctggccccgctccagaaggaggggttattatacgtctgattgaatcarcttccaggatccttattggtccttggtggtaactagggcgctctcttccaggatccttattggtccttggtggtaattaggccactctcgcttcaaagtc

SEQ ID NO: 20780 - DNA, 201 bp, Homo sapiens
acacccccacccccacgtcgagaccaacttagatttttgttcaacaatttcttatcttccagacttgagcataattatctcctgagagataactcctctgrcctcccagaactacctgttcaaaacaaaactttaaaaattatttaagccagccgggcacaatggctcatgcctgtaatcccggcactttgggaggcccag

SEQ ID NO: 20781 - DNA, 201 bp, Homo sapiens
gcggctggatgacatcctggagatgatggccttgccaaactggtttcccagcaggtcctcagtcccactccgagggctgctggccatgacctaggacgcayccagttctgcacataaggaggaaggtcataccccttggatccagccaaccccaacaagaaccatccacctctaggggctccattctccagcctcacctgc

SEQ ID NO: 20782 - DNA, 201 bp, Homo sapiens
cagacagcttggtaaaatagtcattctcagacttgagctctggagcaaaatattacccctagcctctgagctgctccagccacttcccattctgcctttcyagggttgaacctggaagaacctagagtagaccctttctgtgacagccccttgccctaggaaggcttgaagcagaccagtctaatcacctcattttacagg

SEQ ID NO: 20783 - DNA, 201 bp, Homo sapiens
ggagtgtgccagtgagggtgagcagaaggtggtctccagggagaacatgggcagggtttggagccagcacctccccagggttggaggaagcagacccaggmcctgcctgactgggatggggctctcttctgccatctccgcctccacctgcctagctctgctcccccgccccgagagatgcctccaggcttgggtagatga

SEQ ID NO: 20784 - DNA, 201 bp, Homo sapiens
gggtgggctggactgagaggtgggtgtgcggacctcgggggggatcctggtgctgccccaacgtgtccgggggtggaacccggatgtctagacaggagttstggaacgtccagacctgggagcccccacccatacgagaggtctaagccatgggataaagttatgagactgttgggggaagacgcccccggattcctaaga

SEQ ID NO: 20785 - DNA, 201 bp, Homo sapiens
ggggatcctggtgctgccccaacgtgtccgggggtggaacccggatgtctagacaggagttctggaacgtccagacctgggagcccccacccatacgagargtctaagccatgggataaagttatgagactgttgggggaagacgcccccggattcctaagagactccacgccccacaggggcgctagtctgtggcggcag

SEQ ID NO: 20786 - DNA, 201 bp, Homo sapiens
tgtctggcactgccctcactccacctgatcctcctgacagccacctttctccccactcagaactgacactggggctgcgggcgcccccgaccctactcagyaccagtagtgggggcaagagcaccatcacccgtgtcaacagccctgggaccctggctcggctgggcagtgtcactcatgtcaccagcttcagccatgccc

SEQ ID NO: 20787 - DNA, 201 bp, Homo sapiens
acagcggctggatgacatcctggagatgatggccttgccaaactggtttcccagcaggtcctcagtcccactccgagggctgctggccatgacctaggackcatccagttctgcacataaggaggaaggtcataccccttggatccagccaaccccaacaagaaccatccacctctaggggctccattctccagcctcacc

SEQ ID NO: 20788 - DNA, 201 bp, Homo sapiens
ttgccacacatgtagtataagcatgatcaggagccagtgtccaacccatcaggtagcaattacatagtgtcccaccatgagcctagacccccactccctgmgcccaggcatcagggactcccagaagtctaaagaggtccaggctggcacatccagaactctctccttcctgttccagccccttgcctctcctttgtctgt

SEQ ID NO: 20789 - DNA, 201 bp, Homo sapiens
gctctgggaagacctttctaaggaggtgatgtgtgagttaagatctgaatggtaatctggagccagccagagtgaagatgtggttgaagagcacagtcccrggggagaagaaagcaaaggcagaggccaggggagagaaagcagcatggcctctctcaggggcattcatcttatctatgaagccctaagcgattcagaagt

SEQ ID NO: 20790 - DNA, 201 bp, Homo sapiens
agaccggaggcggggtttgcccccacctggccccgctccagaaggaggggttattatacgtctgattgaatcaacttccaggatccttattggtccttggwggtaactagggcgctctcttccaggatccttattggtccttggtggtaattaggccactctcgcttcaaagtcccaaattcaggcgccccgctggggact

SEQ ID NO: 20791 - DNA, 201 bp, Homo sapiens
ctcctttgtctgtgaggctgggtctcctggaattcactgctgcccagtgggcatctgaggccccttctcctcctgcagggccagaagtttgcctggcactrttgcccagagaacacagcggctggatgacatcctggagatgatggccttgccaaactggtttcccagcaggtcctcagtcccactccgagggctgctggc

SEQ ID NO: 20792 - DNA, 201 bp, Homo sapiens
tgggtctcctggaattcactgctgcccagtgggcatctgaggccccttctcctcctgcagggccagaagtttgcctggcactgttgcccagagaacacagyggctggatgacatcctggagatgatggccttgccaaactggtttcccagcaggtcctcagtcccactccgagggctgctggccatgacctaggacgcatc

SEQ ID NO: 20793 - DNA, 201 bp, Homo sapiens
tcactgctgcccagtgggcatctgaggccccttctcctcctgcagggccagaagtttgcctggcactgttgcccagagaacacagcggctggatgacatcmtggagatgatggccttgccaaactggtttcccagcaggtcctcagtcccactccgagggctgctggccatgacctaggacgcatccagttctgcacataa

SEQ ID NO: 20794 - DNA, 201 bp, Homo sapiens
tcctcctgcagggccagaagtttgcctggcactgttgcccagagaacacagcggctggatgacatcctggagatgatggccttgccaaactggtttcccarcaggtcctcagtcccactccgagggctgctggccatgacctaggacgcatccagttctgcacataaggaggaaggtcataccccttggatccagccaacc

SEQ ID NO: 20795 - DNA, 201 bp, Homo sapiens
agacacccatcacccttcttgcctcctgacccaaggcctgggctttctctgaaggaccctgactgggtggagggttagccagggtgacttagggatgcaayacagacagcttggtaaaatagtcattctcagacttgagctctggagcaaaatattacccctagcctctgagctgctccagccacttcccattctgccttt

SEQ ID NO: 20796 - DNA, 201 bp, Homo sapiens
agacagcttggtaaaatagtcattctcagacttgagctctggagcaaaatattacccctagcctctgagctgctccagccacttcccattctgcctttccrgggttgaacctggaagaacctagagtagaccctttctgtgacagccccttgccctaggaaggcttgaagcagaccagtctaatcacctcattttacaggg

SEQ ID NO: 20797 - DNA, 201 bp, Homo sapiens
agccagatccggtgggctgggggttggcagaggccagcaggcaccaggtaggcaatgatgggctctatatgcagctggatcagagcacggactttgaagarcggaagctcatccgggctgcacttcgtgagctccgacaaaggaagagaggtagagagccagttgccctaccctagatccagctgccccattccccagctg

SEQ ID NO: 20798 - DNA, 201 bp, Homo sapiens
tagcatctgctttatagggctgtggtgatggttacatgagtgcatggtatgccataggcactcaatatgtgtcagttatttcatgcttaagtgtgccaggmcctgaggaggaaacaaagttttgagaggttgagaatctgggatgcagaatggctctgctcctgatttgctacactacctgaagcctgtcccttgtcctct

SEQ ID NO: 20799 - DNA, 201 bp, Homo sapiens
aagtgtttttctttttttttcttttttttttttttttttttttttttgagacagagtcttgcttgtcccccaggctggagtgcagtggcatgatctcggcycactgcaacctccgcctcccggtttcacgccattctcctgccccagcctcccaagtagctgggactacaggctccggccaccgcatccggctaatttttt

SEQ ID NO: 20800 - DNA, 201 bp, Homo sapiens
gactgacacatggtaggtgctccgttaatgttaccttttaaaaagattgctggggagagaccaggaccaaaagtgtttttctttttttttctttttttttyttttttttttttttttgagacagagtcttgcttgtcccccaggctggagtgcagtggcatgatctcggctcactgcaacctccgcctcccggtttcacgc

SEQ ID NO: 20801 - DNA, 201 bp, Homo sapiens
tagcataatgactgacacatggtaggtgctccgttaatgttaccttttaaaaagattgctggggagagaccaggaccaaaagtgtttttctttttttttcytttttttttttttttttttttttttgagacagagtcttgcttgtcccccaggctggagtgcagtggcatgatctcggctcactgcaacctccgcctcccg

SEQ ID NO: 20802 - DNA, 201 bp, Homo sapiens
gcataactgtgggagcgtgagcttagccctctgtgtttgtagaagcagaaacaaacctggaagattttggattattaacattatactttcttgcttcaatstcagagtcaggaggtcaggtgttgaccttccccctgccctccaagaggtgtgtgacactggggaagtcacttcccctctctgagcctcagggtttttcac

SEQ ID NO: 20803 - DNA, 201 bp, Homo sapiens
gggtctcagtatatgaatttggagggcacacaactcagtctatagcactgatgcctccatcaaaaataccccatgtgacagctggttgaggaggattaacmtcgaaccaccttattctcaatgccatttaggctgtagcacactttcttccaatcttatgctttttgtttccaagtagaaaagaaacgctttactgaagag

SEQ ID NO: 20804 - DNA, 201 bp, Homo sapiens
agacaccagtcctgtaggattagggccctacccttacgactctctttaaattaatgacttccttaaaggctcaatctccaaatatagttactggggtttarggtctcagtatatgaatttggagggcacacaactcagtctatagcactgatgcctccatcaaaaataccccatgtgacagctggttgaggaggattaaca

SEQ ID NO: 20805 - DNA, 201 bp, Homo sapiens
caactgatgtattttctcacagttctggaggcaaaaagtccaaggtgaaggtgccagcagggttgatgtctggggagggctctgctcctggcttacagagkctgcctcagggctgtgtcctcacatggccttcccagtgtggggggtgtatgtgtgtgtgtgtgtgtgtgtgtgtgtgagtgtgagagagagagagagaga

SEQ ID NO: 20806 - DNA, 201 bp, Homo sapiens
ttccctggtgaatcactcttctcaggatgccttagtaaaacgccacaggctgggtggctccaacaactgatgtattttctcacagttctggaggcaaaaaktccaaggtgaaggtgccagcagggttgatgtctggggagggctctgctcctggcttacagaggctgcctcagggctgtgtcctcacatggccttcccagt

SEQ ID NO: 20807 - DNA, 201 bp, Homo sapiens
tgtgactttcactttcccttttgggttccagggtatatctcagagactggagaacgtgtctggttattatgcagatgcacggctggaggtgggatccacayagctcagaacagctggatcttgctcacactctttcaagagaagcttccttggtaagttaggggtggtctgaccttccccatctccccatcctcacagcag

SEQ ID NO: 20808 - DNA, 201 bp, Homo sapiens
tcaggaggtcaggtgttgaccttccccctgccctccaagaggtgtgtgacactggggaagtcacttcccctctctgagcctcagggtttttcacctgccakagggggttaggatgccctaccctgctgacccccagcaggctgctgaccccatctggggtgaggtgggaggcggggcagtgcgagtcaggggaaagttgac

SEQ ID NO: 20809 - DNA, 201 bp, Homo sapiens
tctctccaatgctaatagtagttcaatcagatgggcatgtggttaaagcctgagaatgaacagcaggtcaaaggtggggaaccaagtagcatgatgccatscaaagacccagagagacgtttcaggggcagagccaggggtcaggatggggcaggggtgggcctgggttggaggagcagcaggaaggctcgggcaccaagg

SEQ ID NO: 20810 - DNA, 201 bp, Homo sapiens
gtcgctgaacatctgtttcagttttcttatctgaaaatggaaatacaaatggtacccacttaataggctcttggaagaggactgtgagttattatttatamcatcttagagcaattagtggtgcaaagtcgagtccacaaatgttcacccctatttctcattgactgttattatacctataagtgccttgactaacactgt

SEQ ID NO: 20811 - DNA, 201 bp, Homo sapiens
ggctgctggcaccatggactcaggtaggcttgcttcttcctcttccctggctggttcctactcgcacctagaatggagggtggcgtttccacaactcagtsagccccagaggaacccggatggtcaagcaggccgatgagtcttccctgagccccaaaagaggccacatggagtcccccgacccaagggtctgtgggggca

SEQ ID NO: 20812 - DNA, 201 bp, Homo sapiens
agacacttgggcatagagtgcaagacacagatttggaatgaggagtcatttacagtaagcatgtatgcatgagtcaatatttttatatatttaagggagtrgagcccagtcatggaagacatgggatttgaatcagaagtcctggctctacccctattgtgaaaacatggcaaggttgcttaacatttgaggtttcttctg

SEQ ID NO: 20813 - DNA, 201 bp, Homo sapiens
ggtataaaccaaaagtaagattctaagcctccccctcatttaaaggacttcctcctcagccagggctcttaaaatttaacctgaaagactggttcaggccrtgaagggaaatgggggtcagacatgcttcattatgcctctctggcattaatatcaacacaggctttcagtctaataagaaacattttacagcctgtttct

SEQ ID NO: 20814 - DNA, 201 bp, Homo sapiens
cagtctaataagaaacattttacagcctgtttctctgtgaagcctgctagctgaaagcttcatctgcaggataaaactttggtctccacaacctcttatcrcaactcaaacattccttcctattgatctccggtctttagacaaactcaaccaattgtcaaccagaaaacgtttcaatttacctgtagcctggaaacgccc

SEQ ID NO: 20815 - DNA, 201 bp, Homo sapiens
gccaacccctacctttgaggggcctgacagggccacctcacagctgcctgggcttgttgttgcctcctcactacagaaaccatggaagtctctagagtcartgtttccaggctggggctgccagatcactcctgtaggtggttgaaccagttgagttcattcttctcagtgagggggacacaggtggaggtccatcggcac

SEQ ID NO: 20816 - DNA, 201 bp, Homo sapiens
cccagttaaggggttgaacttgaccctggcaggtcattaaagattcctcaggagacctaggtattgtggctcagggctgtaattcccgtgctaatgcacgraggctaatgcaggaggatccctcgaacccaggagttcaggacaagcctgggcagcatagcacgaccccatctctgcaaaaatgaaaataaaaagattgac

SEQ ID NO: 20817 - DNA, 201 bp, Homo sapiens
ctctgtgtcgtggcctcgaagggtctttgattctgtgcagcttcttttcctcctcatttctttaagggaggcatcgcattcattagtcttttttttctgayggagtcttgctctgtcgcccaggctggagtgcaagtagcaccatcggctcactgcaccctccgcctcctgggttcaagtgattctccagctcaccctcct

SEQ ID NO: 20818 - DNA, 201 bp, Homo sapiens
ccctccaagaggtgtgtgacactggggaagtcacttcccctctctgagcctcagggtttttcacctgccagagggggttaggatgccctaccctgctgacycccagcaggctgctgaccccatctggggtgaggtgggaggcggggcagtgcgagtcaggggaaagttgacattgcagcccagatgcctgcaggggctgca

SEQ ID NO: 20819 - DNA, 201 bp, Homo sapiens
gtcaggaggtcaggtgttgaccttccccctgccctccaagaggtgtgtgacactggggaagtcacttcccctctctgagcctcagggtttttcacctgccwgagggggttaggatgccctaccctgctgacccccagcaggctgctgaccccatctggggtgaggtgggaggcggggcagtgcgagtcaggggaaagttga

SEQ ID NO: 20820 - DNA, 201 bp, Homo sapiens
tccacaaagcaccatggcacttccctggtgaatcactcttctcaggatgccttagtaaaacgccacaggctgggtggctccaacaactgatgtattttctyacagttctggaggcaaaaagtccaaggtgaaggtgccagcagggttgatgtctggggagggctctgctcctggcttacagaggctgcctcagggctgtgt

SEQ ID NO: 20821 - DNA, 201 bp, Homo sapiens; identical to SEQ ID NO: 5450

SEQ ID NO: 20822 - DNA, 201 bp, Homo sapiens
gatcactggaatatttcccgtacatggggagaaagcatggtggaaagctcactttctggtgattctcagctgaaatagatcggttcctccacaaagcaccrtggcacttccctggtgaatcactcttctcaggatgccttagtaaaacgccacaggctgggtggctccaacaactgatgtattttctcacagttctggagg

SEQ ID NO: 20823 - DNA, 201 bp, Homo sapiens
ggcacatggcagaaggaagcgatcactggaatatttcccgtacatggggagaaagcatggtggaaagctcactttctggtgattctcagctgaaatagatyggttcctccacaaagcaccatggcacttccctggtgaatcactcttctcaggatgccttagtaaaacgccacaggctgggtggctccaacaactgatgta

SEQ ID NO: 20824 - DNA, 201 bp, Homo sapiens
tcgaaactcagattttgaagacactggtgtaaagcgtttgacaataggcacatggcagaaggaagcgatcactggaatatttcccgtacatggggagaaarcatggtggaaagctcactttctggtgattctcagctgaaatagatcggttcctccacaaagcaccatggcacttccctggtgaatcactcttctcaggat

SEQ ID NO: 20825 - DNA, 201 bp, Homo sapiens
tgctcttgacaaaatgaactattttcataacccactgatgggtcgaaactcagattttgaagacactggtgtaaagcgtttgacaataggcacatggcagraggaagcgatcactggaatatttcccgtacatggggagaaagcatggtggaaagctcactttctggtgattctcagctgaaatagatcggttcctccaca

SEQ ID NO: 20826 - DNA, 201 bp, Homo sapiens
agaaacgctttactgaagaggccaccaaatacttccgggagagagtcagcccagtgcatctgcaaatcctgctgactaacaatgaagcctggaagagattygtgactgcggctgaattgcccaggtaacctccgtggggttacctccatggggcgccccggctatgccatcctgatctcccctgggctagttttctctggc

SEQ ID NO: 20827 - DNA, 201 bp, Homo sapiens
cctaaacacatctagatcccaggaatttacataagggtatatatatatacacccttatgtatatatatattatatatatttcaaatatcttacaaaagaawactcactcttgctgtgttcaatacactctgatattttcaatgctcttttctttttaaaatgctgctcttgacaaaatgaactattttcataacccactga

SEQ ID NO: 20828 - DNA, 201 bp, Homo sapiens; identical to SEQ ID NO: 5454

SEQ ID NO: 20829 - DNA, 201 bp, Homo sapiens
tttgtagcgttgaccagtgtgggagtggtcagtgatacagcatatgcaccctgtgtcatattgacacagattgaaaatgctgccatcctaaacacatctakatcccaggaatttacataagggtatatatatatacacccttatgtatatatatattatatatatttcaaatatcttacaaaagaatactcactcttgctg

SEQ ID NO: 20830 - DNA, 201 bp, Homo sapiens
ttgtggctcagggctgtaattcccgtgctaatgcacggaggctaatgcaggaggatccctcgaacccaggagttcaggacaagcctgggcagcatagcacraccccatctctgcaaaaatgaaaataaaaagattgactgacatagtgatgcacttgtagttcccactactcagaaggatgaggcaggaggatcgattgat

SEQ ID NO: 20831 - DNA, 201 bp, Homo sapiens
atgtcccagtgcatacataaatccatactgcttcccagtcccttctctgcagttccataattcccaaatccctgcaaaccacacatttttggggcaactcmtctgggcagtaatcctgctgtgtactaagatgctttgtactgataatattatgtatcccatttaaggtgaatattcattggtttctctgttgaaacattt

SEQ ID NO: 20832 - DNA, 201 bp, Homo sapiens
gcaccacagccttggggaagtggaaacagcagggtcggggagtagggggagagcagggtccaggaggtgcggagggctgagagaggaggttgaccagcagycccgacctctgacctcccgctctgctcccagctgaccctggggtgtttccagcacaggccagtcccctccctccagctcttgccctgcaccagcccctct

SEQ ID NO: 20833 - DNA, 201 bp, Homo sapiens
gggagccacggttgcacccatctcctggcctgtgtgtgatcatcgaatgaggcacatatgaggagccctgcagatcacagacacccagtacacactggctrttatcaattagttatcacacatgttgccaggcccaggtcattgtcagaacgttccttcccatctctatttcggtgtatagactctgtagtttctgtgatt

SEQ ID NO: 20834 - DNA, 201 bp, Homo sapiens
tcaccatgttagccaggatgttctcgatctcctgaccttgtgatccacccacctccgccacccaaagtgctgggattacaggcatgagccaccgtgccagrcgcattccttagtcttaatgggcatagtgttagggacccgcctactccctatggcaggagatttagtgatttctccctttttggtgatagaaacaacgct

SEQ ID NO: 20835 - DNA, 201 bp, Homo sapiens; identical to SEQ ID NO: 5451

SEQ ID NO: 20836 - DNA, 201 bp, Homo sapiens; identical to SEQ ID NO: 5452

SEQ ID NO: 20837 - DNA, 201 bp, Homo sapiens
gagaacatgccaggcaaggtgatctcttccagtctgaggttttatttgatagcttaaggactcagagttagtcaaaatgcaatgtctgaaggcacccttcyttctgacaccagttgcagatttgaaggtgtttcttaagcccccactcaggtttgataattcactacaaagacttacgtaactcactgataactgttattg

SEQ ID NO: 20838 - DNA, 201 bp, Homo sapiens
gataacaggcatgcaccaccatgcccggctaattttttcatttttttagtagagacagagttgctccatgttggtcaggctgctctcgaactcccaacctsaggtgatccacccacctcagcttcctaaagtgctgggattacagatgtgaaccagtgtgcctagccagcttttctttagggagtaaatcattttctttac

SEQ ID NO: 20839 - DNA, 201 bp, Homo sapiens
catgggatttgaatcagaagtcctggctctacccctattgtgaaaacatggcaaggttgcttaacatttgaggtttcttctgtttcaaaatgggagccacrgttgcacccatctcctggcctgtgtgtgatcatcgaatgaggcacatatgaggagccctgcagatcacagacacccagtacacactggctgttatcaatt

SEQ ID NO: 20840 - DNA, 201 bp, Homo sapiens
attatactgactggtaacaagtagatttagttctcatatgtaaatgttctgttttgttctaaaagttaaaagttaaccaagtgtttacattttggtgacgytttaaatcttgcttactgttgagctgagttgtacaatatggttgcacatgttttgctgcacggctttagtttttcctgatgtttctaattgcctttgttt

SEQ ID NO: 20841 - DNA, 201 bp, Homo sapiens
agtgtatacggttcagacaaatcatttaataaagagggctccactcactcccttcccaattaaaagcagctaattttgatgttcagattttcctttttttwttttctgagacagaatttcactcttgttgcccaggctggagtgcaatgtagctatcttggctcaccacaaactccacctcctgggttcaagcgattctcc

SEQ ID NO: 20842 - DNA, 201 bp, Homo sapiens
ggtgcaattacatttgacatgctggcaaccaaataaaaggcaaaccttgcatatgccacacacacactcacaaattcacacacacacacacacacacacacgcacactcacacctgctattcagatttcacttcatggagccctgtgtttctcacctctgtgtcgtggcctcgaagggtctttgattctgtgcagcttctt

SEQ ID NO: 20843 - DNA, 201 bp, Homo sapiens
aggtgcaattacatttgacatgctggcaaccaaataaaaggcaaaccttgcatatgccacacacacactcacaaattcacacacacacacacacacacacacgcacactcacacctgctattcagatttcacttcatggagccctgtgtttctcacctctgtgtcgtggcctcgaagggtctttgattctgtgcagcttct

SEQ ID NO: 20844 - DNA, 201 bp, Homo sapiens
agaggttgtttcacccaccctgactctgagcacctacttgagccaggccctgtgggtaaactgaggccatgggagatgagtgactcgctgagggtcccatrtcaggaagttgagcaggtagatcacaggactccatgtccctgacactcacctggttccttttcaggcctctgggtgatagagaagaaagaagctgtgctg

SEQ ID NO: 20845 - DNA, 201 bp, Homo sapiens; identical to SEQ ID NO: 5457

SEQ ID NO: 20846 - DNA, 201 bp, Homo sapiens; identical to SEQ ID NO: 5459

SEQ ID NO: 20847 - DNA, 201 bp, Homo sapiens
aagatgaggagagggcagggaagattagaagccgggacctaccagccaaccccggaatccttcagaagggcttggctgggaggctcaaggaagaaactctstctccgaaacaagatgatctgtggtttaataacgcggccagctgggttcagaggtgatagtggggagccatgtcccctgagaccagcctgcagaggacag

SEQ ID NO: 20848 - DNA, 201 bp, Homo sapiens
gtttttctttttttttcttttttttttttttttttttttttttgagacagagtcttgcttgtcccccaggctggagtgcagtggcatgatctcggctcacygcaacctccgcctcccggtttcacgccattctcctgccccagcctcccaagtagctgggactacaggctccggccaccgcatccggctaattttttttgt

SEQ ID NO: 20849 - DNA, 201 bp, Homo sapiens
acaggtggctcacattcagtcccacaatttgctttctcctcctcaagggttaagaaaaaaaacgaacccttccagtcaggtcagtgactggagagctccawggaaagtctctcagtgacctggctgctggcaccatggactcaggtaggcttgcttcttcctcttccctggctggttcctactcgcacctagaatggaggg

SEQ ID NO: 20850 - DNA, 201 bp, Homo sapiens
gggggacaaagggtgtccagcacagcaccagtgaattcaccaagacagacacttgggcatagagtgcaagacacagatttggaatgaggagtcatttacartaagcatgtatgcatgagtcaatatttttatatatttaagggagtggagcccagtcatggaagacatgggatttgaatcagaagtcctggctctacccct

SEQ ID NO: 20851 - DNA, 201 bp, Homo sapiens
ggacaaaacacatggggtgttgccaaccagagaagctcacccagttaaggaaaaattcctgtgaatcacattagatcaggaagcctttattcaggattgttgttacaggggagggagactgagcccagctcccaatatagtaaagacagagggggagtcacagccaacaccagggtgaggagtgggagatggaccagttct

SEQ ID NO: 20852 - DNA, 201 bp, Homo sapiens
cttggctctgtccctgcacagctctggggctgttgttttatgtcttggagactgggacctgccatctctccaatgctaatagtagttcaatcagatgggcrtgtggttaaagcctgagaatgaacagcaggtcaaaggtggggaaccaagtagcatgatgccatccaaagacccagagagacgtttcaggggcagagccag

SEQ ID NO: 20853 - DNA, 201 bp, Homo sapiens
ggtatgcacacaggtgaagctgtcacctgctaaggcattagtttggctggcgacatgtgacagtgagaccctgaagcttggaggtgccaggtcaggaggcmgtcaagtggcttgagagttcatgtgcagccaggactaatagccaggcctttcacttttcagtcaaagggggcagtggctggacccagtggccttcagtca

SEQ ID NO: 20854 - DNA, 201 bp, Homo sapiens
tcaaagtctcatgagtccataagaggttccatgaaattgcacatggcattggtatgcacacaggtgaagctgtcacctgctaaggcattagtttggctggygacatgtgacagtgagaccctgaagcttggaggtgccaggtcaggaggcagtcaagtggcttgagagttcatgtgcagccaggactaatagccaggcctt

SEQ ID NO: 20855 - DNA, 201 bp, Homo sapiens
tgtccaaatgcaggtcttttcagcattagtgatttatagagatgattttcaaagtctcatgagtccataagaggttccatgaaattgcacatggcattggyatgcacacaggtgaagctgtcacctgctaaggcattagtttggctggcgacatgtgacagtgagaccctgaagcttggaggtgccaggtcaggaggcagt

SEQ ID NO: 20856 - DNA, 201 bp, Homo sapiens
gagagggatatttcttccctccctgatttgatcccatcactgatgggcatagtgggccatgggtgactgtttccctgacagcatgcctgggaactggggcrttctgaactgccatttgggaccctcttctgttctacatagagtagaggaagtgtttcttcgggccagcttggagagttggaacaagtgtctgccaactgg

SEQ ID NO: 20857 - DNA, 201 bp, Homo sapiens
ggatggggcaggggtgggcctgggttggaggagcagcaggaaggctcgggcaccaaggctgggagtagggtgagaagagggaggcactgagggcatgaaakgtaacgtggccatggacttgcagaggaccagtgagtgggagagggatatttcttccctccctgatttgatcccatcactgatgggcatagtgggccatgg

SEQ ID NO: 20858 - DNA, 201 bp, Homo sapiens
gttttatgtcttggagactgggacctgccatctctccaatgctaatagtagttcaatcagatgggcatgtggttaaagcctgagaatgaacagcaggtcaraggtggggaaccaagtagcatgatgccatccaaagacccagagagacgtttcaggggcagagccaggggtcaggatggggcaggggtgggcctgggttgg

SEQ ID NO: 20859 - DNA, 201 bp, Homo sapiens
atcttgacctgatcaatgtgtgttcctggagatgctgtccggggcccttttcttccacctctgaggaactgcacaaacacagcaggatcctcctgctgacmcagaacacagagaggctggaatggagttggacagagctgggggtggatcttggctctgtccctgcacagctctggggctgttgttttatgtcttggagac

SEQ ID NO: 20860 - DNA, 201 bp, Homo sapiens
gaaaaaaaattgcaaaacgatcttcagaagctgtgctgctgcctatggcagtgtggcagggagggggcctcgggtggggtgagtgcccaaaagggtgggcraggacgatttggggagttctccaaaggttatgacccactatgggcctacccttcgttcccggctgtaaacctctaaacttagcatttatccaagctatcc

SEQ ID NO: 20861 - DNA, 201 bp, Homo sapiens; identical to SEQ ID NO: 5455

SEQ ID NO: 20862 - DNA, 201 bp, Homo sapiens
ttggctcagagctgaggcaggagggagggctccctgtctgggcctcctccaggaactaaagtccctttccgggaattgaccaaactgcaggcttgcccagrgaggacatgctgtgtcctagttcagctcgaggggcagtatccagcttcaaccctcagcggatgccccagacaagattccgagccaggccaacaacgccta

SEQ ID NO: 20863 - DNA, 201 bp, Homo sapiens
ggcctgggccattgccgtgggggaggggaggcttggaaaccatggctatgattcagaggttagctggctcgcgtgtttttagaaatttcttttttctttcycctcgtacaaaagtaataagactggggaggacacgggagaaaataaatggaaactcagaaacctgatagagccaccaaaagtacatgaaatcagagtcat

SEQ ID NO: 20864 - DNA, 201 bp, Homo sapiens
agcaataaatacacagatctagtgctggaggttccctccatccaaccctggtttccttcatcctttcagtgaaggaggaaaaaataaaagcaaaatacccstcacccaagtcagcactgtgttcatttccctaaggcctgttttctcccctcactgagttgccttggcaaccaagtcacatctgctcaggagccgccctgg

SEQ ID NO: 20865 - DNA, 201 bp, Homo sapiens
ctggccgaagttaagttttgtttgtgcctaacgtaagcacccatctgaaacgactccagttaagttccccatagttggcagtttaaggggggttacagccwttctgaaggcctgtttgcttttgtttgcccaggtgttcattttaagtttgctttaacaccctggtactcccaccccagcaataaatacacagatctagtg

SEQ ID NO: 20866 - DNA, 201 bp, Homo sapiens
cctccctccagctcttgccctgcaccagcccctctgctctgagtggccctgtgaaaagagtgactcagcgtcccactgaactgagccccattctggccttygccacgtcttctctgtgtcacctggagcttcttacctcccctcacctggaatgcgagtataatatttccccatgtggtcatgaggatcaaatagtacatg

SEQ ID NO: 20867 - DNA, 201 bp, Homo sapiens
cccccgacccaagggtctgtgggggcatctatgtcctgacctctcctcaggggagcatggcccaggtgcccacttcctccctgccctggcacctagcaaaygactcaagtggggcaccacagccttggggaagtggaaacagcagggtcggggagtagggggagagcagggtccaggaggtgcggagggctgagagaggag

SEQ ID NO: 20868 - DNA, 201 bp, Homo sapiens
gggtttcatcgtgttagccaggatggtcttgatctcctgacctcgtgatcctcccgcctcggcctcccaaggtgctgggattacaggcatgagccgctgcrcccgaccaagtgtttttcttagagttggatgcccagcaggactttctttgaaaaaagccagaaaaatcttgacctgatcaatgtgtgttcctggagatgc

SEQ ID NO: 20869 - DNA, 201 bp, Homo sapiens
ctcggctcactgcaacctccgcctcccggtttcacgccattctcctgccccagcctcccaagtagctgggactacaggctccggccaccgcatccggctawttttttttgtatttttagtacagacggggtttcatcgtgttagccaggatggtcttgatctcctgacctcgtgatcctcccgcctcggcctcccaaggtg

SEQ ID NO: 20870 - DNA, 201 bp, Homo sapiens
tgtttttctttttttttcttttttttttttttttttttttttttgagacagagtcttgcttgtcccccaggctggagtgcagtggcatgatctcggctcaytgcaacctccgcctcccggtttcacgccattctcctgccccagcctcccaagtagctgggactacaggctccggccaccgcatccggctaattttttttg

SEQ ID NO: 20871 - DNA, 201 bp, Homo sapiens
aggatgcttgagtcaccagcttgccatcctgtgtcattcaacacctcctccagactcttcgcaggaaggtgacccagaaaccccttgaaggacatgatacygtccctgtgctctgatgtgccccctggtgtttgagtggagtgatttttagatagcggtttgcctgttaaaaccttccctttgttccctatattattgctt

SEQ ID NO: 20872 - DNA, 201 bp, Homo sapiens
cagtaaaagagttcactcatctgttgcttaaaatataggatgcttgagtcaccagcttgccatcctgtgtcattcaacacctcctccagactcttcgcagraaggtgacccagaaaccccttgaaggacatgataccgtccctgtgctctgatgtgccccctggtgtttgagtggagtgatttttagatagcggtttgcct

SEQ ID NO: 20873 - DNA, 201 bp, Homo sapiens
gctccttcttaggttctgggggctggtttgactggatgatgcctactcttctcttatggctggtaaatggtgtgattgtcctgagcgtctttgtgaagctkctggttcatggggagccagtgatccggccacactcgcgctcctcggtcaccttctggaggcaccggaaacaggcagatctggatctcgccagagtgagtt

SEQ ID NO: 20874 - DNA, 201 bp, Homo sapiens; identical to SEQ ID NO: 5502

SEQ ID NO: 20875 - DNA, 201 bp, Homo sapiens; identical to SEQ ID NO: 5501

SEQ ID NO: 20876 - DNA, 201 bp, Homo sapiens; identical to SEQ ID NO: 5490

SEQ ID NO: 20877 - DNA, 201 bp, Homo sapiens
agcaactcaaatgtccatccacaggaaaataagcacattgtgatatattcatacaatgaaattatgcctagcaattaaaaaacagaactgctgacaggcayggtggctcacgcctgtaatctcagcactttgggaggccaagaggggtggatcacctgaggtcaggagtttgagaccagcctggccaacacggtgaaaccc

SEQ ID NO: 20878 - DNA, 201 bp, Homo sapiens; identical to SEQ ID NO: 5492

SEQ ID NO: 20879 - DNA, 201 bp, Homo sapiens
gagttcgagacccacctatcaatatggtgaaaccctgtctctactaaaattacaaaaattagccgggcatggtgccgtgcacctgtagtcccagctactcrggaggctgaggcgggagaatcgcttgaacccaggaggcagaggttgaagtaagacaagttcgcgccactgcactccatccagcgtgggcgatagaggaag

SEQ ID NO: 20880 - DNA, 201 bp, Homo sapiens
ccttgtgatccacccgcctcggcctcccaaagtgctgggattacagacgtgagccactgcccttggctttcatagttttctgttctccatattttctgctrtggatcctgaacatatattgggttggggggagggggggcatgtattattaatcttttttttaattttttttttttggagacagttttgctcttgttgccc

SEQ ID NO: 20881 - DNA, 201 bp, Homo sapiens
atggtagaattttagcagaaggtccctatctgcaaatttgccccgctgttatcttgtctgttcctcagtgtgcccttgggacagaataagcccatactcasgtctctgatcaggctgtgtcctccttgctgccaaattctggagaattccagctgagaagctttacgtcactcattccttccatactcactggcattccct

SEQ ID NO: 20882 - DNA, 201 bp, Homo sapiens
gaggccgaggtaggagaatgtcgtgaacctgggaggtggagcttgcagtgagccaagattgcgccactgcactccagcccgggcgacagagcaaatctccrtctcaaaaaaaaaaaaaaagaaatagtgtgtcaagccaaaggagttcatgctaatgagtccatttatatgaagtttaaaaagaggcaaaatgaagctatg

SEQ ID NO: 20883 - DNA, 201 bp, Homo sapiens
cgaggtaggagaatgtcgtgaacctgggaggtggagcttgcagtgagccaagattgcgccactgcactccagcccgggcgacagagcaaatctccgtctcaaaaaaaaaaaaaaagaaatagtgtgtcaagccaaaggagttcatgctaatgagtccatttatatgaagtttaaaaagaggcaaaatgaagctatggtgct

SEQ ID NO: 20884 - DNA, 201 bp, Homo sapiens
tttcttttcttcctagtgaattctccagtgctctggagtacttgaaattacttcattcttttgtggactctgtgggggttatgagccccccactctccagsagctccgtgctcaagtccgccctgggtaagcacctgcgggtggcccacagtctcagggtgctcagttcaggtcttcacagtgcttttgccccaggggtcc

SEQ ID NO: 20885 - DNA, 201 bp, Homo sapiens
gaggtaggagaatgtcgtgaacctgggaggtggagcttgcagtgagccaagattgcgccactgcactccagcccgggcgacagagcaaatctccgtctcaaaaaaaaaaaaaaagaaatagtgtgtcaagccaaaggagttcatgctaatgagtccatttatatgaagtttaaaaagaggcaaaatgaagctatggtgctg

SEQ ID NO: 20886 - DNA, 201 bp, Homo sapiens
gaaggcactgagacagagaaattagatgatttgccaatgcttcctatgctgatgacggggaatgaacttggattttctgatgtgggattccatattcttcrctgtcctatgaaaatgaggtgggagatgccttgattcaggaagcctgtctgtctaggagccccttctctggtcaaaagttgtttttaaaaaatccttgct

SEQ ID NO: 20887 - DNA, 201 bp, Homo sapiens
agttttctctggtgccaactcgtggttcaccgtgtacaactttagaagtggttaacagtttgacagcaaagcagaaatcatatgacttgtttctggcataygtagatcaaaacttaaaacatatttagccatgttaatcctcttgtggtgtagtttatcagcagtgattcttgaagggaggtagtaaccaaggttccgtgg

SEQ ID NO: 20888 - DNA, 201 bp, Homo sapiens
gatgtgtcctataaacagtggcacattgtagataagttggcagtgtttttctttagtgatacttaaattaatggtgagacttaaaattgctgacatcttakagtcaatgaaatatgatcatctgtttcattcagtaagctcctgctataataggcagagaggtcaacaaatgaatgacagttcagcgtgagtatgttagac

SEQ ID NO: 20889 - DNA, 201 bp, Homo sapiens
ccagtggctcacgcctgtattcccagcattttgggaggctgaggtgggcagatcacctgaggtcagtagtttgagatcagcctggccaacatgatgaaatyccatctctactaaaaatacaaaaatgagccaggtgtggtggtgggtgcctgtattcccagctactcaggaggctgaggcaggagaatcacttgaaccagg

SEQ ID NO: 20890 - DNA, 201 bp, Homo sapiens
cgagccaggtcatgtgggcccatctcagccccaccacgggctggccgtgagaggctggacaagttcacttcttttccgtggattgggtggggcagcagacyccacctcccaggatggatgtgagcgttcagtgaatgagtccaggtaacgccaaggaactgcaccaacttcatggtagattctcggttgtgacacacatct

SEQ ID NO: 20891 - DNA, 201 bp, Homo sapiens
agcagcaggtgcagacagtacaggcccagcgggtgctgacacaaacggccaatggcacgctgcagacccttgccccggctacggtgcagacagttgctgcrccacaggtgcagcaggtcccggtaagtggctggaaaggattcagggaggcactggttggggctgttaactggtccttggttgaagatgtggtctacatac

SEQ ID NO: 20892 - DNA, 201 bp, Homo sapiens
gctgggattataggcacccacctccacacccagctaattttttgtatttttagtagagacggggtttcaccatcttggccaggctggtcttgaactcctgwccttgtgatccacccgactcggtctcccaaagtgctgggattacagacgtgagccaccgcgcccggcccacatgcttagtttctatgttcctgtaactaa

SEQ ID NO: 20893 - DNA, 201 bp, Homo sapiens
cacccgcacccaccagctgctggaacacagcctgcggcggcgcaccacgcagagcaccaagcacggtgagtccacccctccccagctcacaggctgggccrggccctgcgccctaggaagagaggagaagaggggccagcccagctcccacatctggcattggtgcccagcacacctctcgcctctctgagaatgaaagaa

SEQ ID NO: 20894 - DNA, 201 bp, Homo sapiens
gagaaccctcccccatccctagcctccccttccactcccagtctcctctacagaaagaagctaactaagtatctccagagagtttaataccacatctctgsgggggtggtcccttaaagaacgggtacaacaccttattgtggccactttataggtaaggaaactgaggcacacgttggaatgactatcttgggtggcttc

SEQ ID NO: 20895 - DNA, 201 bp, Homo sapiens
tcatgtgcatttctaaaaatcatgccatgcgaaatcatgcagtaaaaaacacggagtgggcatgttggctcatgcttgtaatcaggaggctaaggtgggaggatcgcatgaggcagggagttcaagaccagcctgggcaacaaagcaagacccagtctctcttacaaataaaaaataaaaattatctggacatggtggtgt

SEQ ID NO: 20896 - DNA, 201 bp, Homo sapiens
ctgttccctcacgtcctgcggagttcaccagactctggggctctccacttcctcccagagctgctgagtgttggtctggggagaggcctggtaggtgctargatccttgcctcagggatgggccagtcacctgtctcccctctctcgtggctgaccccacaggtggtccagctgctcacctgtgacctgctactgtcgcta

SEQ ID NO: 20897 - DNA, 201 bp, Homo sapiens
tgcccctgccacctgcctgtgctgtattccctatacaagctgctgtccctgtcagagccttgctttctcacctgcagaatggggagggcttgtctcccacytcctggggccatggaaggaactggttctcccctgagctgttccctcacgtcctgcggagttcaccagactctggggctctccacttcctcccagagctgc

SEQ ID NO: 20898 - DNA, 201 bp, Homo sapiens
cagcacttctttaagcacttgtaatttttattcctttggataaattcctagaagtttacaacacgaccagctgcaagatggggcagtgaggtgcttgaagsagtgggtgggctgcacttcagaatcccggtggaactttttcaaaaaactcgtgcccggggcccccctctcaggaggccgtcggtgggcctgggcactggc

SEQ ID NO: 20899 - DNA, 201 bp, Homo sapiens
ttgtgctgaaattggggtgcctgggggtcatccattaggaaatgagatgtagatacttaggagaaggtaaaactgggatggagattgaagagagtcactgytgagtcaagaggagagaactgggagattagaggttaggaaagtgttagcttttcaaggagtagtctgtagatggtggagacaatgccacagagaacaaca

SEQ ID NO: 20900 - DNA, 201 bp, Homo sapiens
tccctttgggtttctcctccctcctctgtctatttggcctcgcccttgacaaacattccccacattcacacccaggcctttggcctaatgttcttgaatgytgcttgcctctcattgaataggcttttatgtagctctcatattcagttcatattttggcattttaaaaaatatatatttttgcttctttctcaactagat

SEQ ID NO: 20901 - DNA, 201 bp, Homo sapiens
ttcactcctcaaatttgtaattaaaaaaaggaaattctcaagcagttttattcaattagaactttgcaaatatcaaattgtccgtatccttctggattctygtctgaacattgcttatctgcgtacatatcacagtgttttcacatagggattgctgtatgttgaagtagttgaggtgtaatagccatataatctaatgtg

SEQ ID NO: 20902 - DNA, 201 bp, Homo sapiens
ggaaagaggttagagcaagtttgggtctgcagtgctaggattagaggtggcctcacaagccaaaaccgctatactcacagccttaggacagtgactccctrctcgctgcctcagtgtttccagctgtaaaaaaggacccttggtaccttcgacagaacagcacccatctagtacaaaggtagttccttttatgatcaaaac

SEQ ID NO: 20903 - DNA, 201 bp, Homo sapiens
tttgcagttttttcttaacataagcactgttctgaatacttgtgaacaagtcacttgggagtttgttcatgggcgtgtatcttccaaagaggagtcttcamgttcagctgggtaacacactatcagctgtagccctttcattttaaaaacatttccagtgctgcaaattactatggtgattgggaattacaacttggaaat

SEQ ID NO: 20904 - DNA, 201 bp, Homo sapiens
tgggagatgggaagaaaacgaatacttttcagtctttgccctgtgcggagttccacacaaggcacataggatcctccagctcccagcccagagtacatagygtatgcaaatttgagtggatgtttgtatttgtagcgtgatttgataacctgctttgcaagtattctttttctctttagttttagggagatttgggggcat

SEQ ID NO: 20905 - DNA, 201 bp, Homo sapiens
tcgtgtcaaagaaagtcctatgatagatgcttgtggtgagaggaaaaagggaccctgctgctgaatagtcacagggcagtggagtgggcgcctctgcatarataattaattccagggacatgagatgatctatgtctccggtatgacaggaataatgaagttgagttctgagggaggggttctagggcttgagcggggctg

SEQ ID NO: 20906 - DNA, 201 bp, Homo sapiens
ccacagcctctttcacatcaggcaattagcagatgagttacagggggaggctcctaggccccagttggggaagattctggtgtctataaaatttaggaaamcttaaaaaaaaatttttttttttttggcttgggattacaagccaagccaccagcgtggccaagatggtgaaaccctgtctctactaaaaatataaaaatt

SEQ ID NO: 20907 - DNA, 201 bp, Homo sapiens
tcattggttttgttcttaaatatcaatagtgcaaccactggcttttattcaaaggtttaattggaatctaacctggggattttcccctttttaaatttatrtttaaaaaaaaaaactatggaaagtcggcatggtctgggctgcttgggagcctgaggcaggaggatcacttgagtccaggaatttgagactctcctgggc

SEQ ID NO: 20908 - DNA, 201 bp, Homo sapiens
agggggagtagaagtctatatcaaaacaaaaagccggagcaaggccagtgaccattaacaccttttgatactttgtagggagattttgcagctgctgccgscaacctacaaacctgcctggcagttttgggccgggcactgcccacctcccgcctggacctggcctgcagcctctcctggaacgtgatccgctacagcctg

SEQ ID NO: 20909 - DNA, 201 bp, Homo sapiens
tttagtagagacggggtttcaccgtgttagccaggatggtctcgatctcctgacctcatgatccgcccgcctcggcctcccaaagtgctgggattacaggygtgagccaccgcgccaggccgacatggtgattcttaattgctatgtcattctttttttctgaacatattaaaagagaaataacaaagtgggggaagtact

SEQ ID NO: 20910 - DNA, 201 bp, Homo sapiens
tccagctgagaagctttacgtcactcattccttccatactcactggcattccctgtgtgaggcactgaggggacagaggtaactacagtatggttgccacrctgccctctcacctcccttcctgtgtctcctgcaggaggaacacctgaggccagtacagaatggagtgtggaggctgagatctccctaggctgataaaaa

SEQ ID NO: 20911 - DNA, 201 bp, Homo sapiens
ttccaagtagctgcaattacaggcgtgtgccaccacgtccagctaattttttctatttttagtagagatggggtttcactgtgtttgccaggctggtctcraactcctgatcttaagtgatccgccggccttggcctcccaaagtgctgggattacaggtgtgagccactggcacccagccacattgtgaaggttttttaa

SEQ ID NO: 20912 - DNA, 201 bp, Homo sapiens
tttggaaacacacagtgtggctgtgctgctgacattgttatgttgcactgtgcgcctctgagtcctatacaacaacctgcaattgtgacagctctgggtgygacagaaatgggtgccatgttcccagctaccctgtgaggtagacaggaacacacagccagtatatcacagagcctggcatcccatcctgtgatcaggcct

SEQ ID NO: 20913 - DNA, 201 bp, Homo sapiens
gagaggagaagaggggccagcccagctcccacatctggcattggtgcccagcacacctctcgcctctctgagaatgaaagaagcccgaggccgcccttggygggttgcaggggttggggtggtcatgggtcatgctgtgatcagggaaggagggttggggtggcgtcccagcacaggtgcaggcatagaagcagaagctcg

SEQ ID NO: 20914 - DNA, 201 bp, Homo sapiens
ccctgagcacttacctagccaggagttaagatgcagaagcagttatgaacccccttccccatcaggtgctgcccacctggaggggtaggcaggcattcatkcagtcgctcatttcaccaggactcccagcaaccgataaaacagaccaaaattcctccccttgtggccttaataccataagccttgtaggcaggacatttt

SEQ ID NO: 20915 - DNA, 201 bp, Homo sapiens
tctgaacatattaaaagagaaataacaaagtgggggaagtacttgcagacatttaagaagaataagtatctataatatctggaagttttttaaatcagtgaaaaaaaaaaaaagacaaaatagcctgatagcaaaaatggacgaaggtcaagagcaggcggtttacaaaggaagaaatgcaaatgctcaataaaattggga

SEQ ID NO: 20916 - DNA, 201 bp, Homo sapiens
caggagacctaggggccaggtttgggaaaagtggttccatgtcttcagttgatcaacaagtattcaagtgctggctgtggtttctgagctgtaaggaatcrtgaaagatagcatagaattttatggcttcatggagcttgagatgagaaactctagtgccagtatggaacagcttaaaattgcacagcacaacaagtaaaa

SEQ ID NO: 20917 - DNA, 201 bp, Homo sapiens
ctatgccttaagataactgtccaggctaggcactgtggcttacgcctgtaatcccagcactttgggaggctgaggcgggtggatcacgaggccaggagttmaagaccagcctggccaacatggtgaaaccccgtctctactaaaaatacaaaaaattagccgggcgtgctggcaggtgcctgtaatcccagctacttggaa

SEQ ID NO: 20918 - DNA, 201 bp, Homo sapiens
caaaaagagttgggcatgctgaaggtcagtggtctgaagataaaattatcccttgattctcacccctgtgttcccattactgaatgttagctccttgaggyagagaccttcgtttcattcccactaaattctttgaacctagaacagtgcctggcacagtgagagtgcccattaaatatttgtggaatgcctgagtgatcc

SEQ ID NO: 20919 - DNA, 201 bp, Homo sapiens
tggtccagcctcagatcatcaagacagattcccttgttttgaccacactgaagacagatggcagccctgttatggctgcggtccagaacccggccctcacygccctcaccacccctatccagacggctgcccttcaagtaccagtaagagctgccttctcccccaccctcctccctccccctttattcctggaggtgttag

SEQ ID NO: 20920 - DNA, 201 bp, Homo sapiens; identical to SEQ ID NO: 5497

SEQ ID NO: 20921 - DNA, 201 bp, Homo sapiens; identical to SEQ ID NO: 5498

SEQ ID NO: 20922 - DNA, 201 bp, Homo sapiens
actgtttccgtagtcacctctactttttgatcgttcaccaggttttgaaatcactgtgtaggcagcacccactatgcagttcaaaactttatgtaggcctsttttgtactgggctccaggttcagtgctggcaaataaacaagttccttgttctcacagaatgtgtatggccttgggtgccaggcaccgttccatgcctta

SEQ ID NO: 20923 - DNA, 201 bp, Homo sapiens
tgtaagcaggcttctaagttgcaaataccaggtggtgtggtgtgctttgaagctatttattcaacatgtgtttatcaagaagtgtctgtccaggcgcagtrgctcatacctgtaatcctagcactttgggaggccaagatgagaggatcccttgagcccaggagtttgagactagcctgggcaacatacctggacaacata

SEQ ID NO: 20924 - DNA, 201 bp, Homo sapiens
gggaaaggcccccagtagagggaagagtgtcagtgacagcccagagacacggaggaaggatgcctgaggaatacaaagggtacacatagacagcgcttgcrtgtgcctgggatgacaggaaagggacagaaatggccattgggtcttagagctggagagctgaacagctaggccatgaggtgggccttgtgtatatgtttt

SEQ ID NO: 20925 - DNA, 201 bp, Homo sapiens
tgctgcccacctggaggggtaggcaggcattcattcagtcgctcatttcaccaggactcccagcaaccgataaaacagaccaaaattcctccccttgtggccttaataccataagccttgtaggcaggacattttggtcccctgaggtaatatgaggtaatatgaagattggttcagcaatagcagagctactgtacttgg

SEQ ID NO: 20926 - DNA, 201 bp, Homo sapiens; identical to SEQ ID NO: 5489

SEQ ID NO: 20927 - DNA, 201 bp, Homo sapiens; identical to SEQ ID NO: 5504

SEQ ID NO: 20928 - DNA, 201 bp, Homo sapiens
agtgagggtaggctgtgggggatgctagggaaaggcccccagtagagggaagagtgtcagtgacagcccagagacacggaggaaggatgcctgaggaatayaaagggtacacatagacagcgcttgcgtgtgcctgggatgacaggaaagggacagaaatggccattgggtcttagagctggagagctgaacagctaggcc

SEQ ID NO: 20929 - DNA, 201 bp, Homo sapiens
agatcatctgaggtggaaaagagtccctggtaaaagtaattttaaatagttttgaagtagaattgtgaaattcagagtttggagaaaggaagagggtggtsacaagtagaaaagagaagacatggcacttacattcaaagaaagattgccctaccccacccctcaaaggcatgtgcagaagagggagtgagtacttttcca

SEQ ID NO: 20930 - DNA, 201 bp, Homo sapiens
atttcaaagaatcttatagttcttcaatggagttcaagaattgggacaggtgggggaatgtaaaggcaaaaagctgagacagtcctcccaaagtgcacttkccgtccagaaaggatggaagaaaatgaagccccagggagttgttgattctcaacatctgttaactcccttgctgggtgcagtcatttgctgattagcttc

SEQ ID NO: 20931 - DNA, 201 bp, Homo sapiens
tcttgtcaccagttgggaaaagcaggccttttgcctctctctcctctcatcctgctcctgctgttcagccaggtttcctgcctggctcagggtcagagtaygggacaacagaggttgcttttcaggggtgagcaaggcagggtggtgtgggaagggatgtcatgaggtggcaggcgagatggctcagggagagctaccctg

SEQ ID NO: 20932 - DNA, 201 bp, Homo sapiens
caccccggcacctccccaggtgttcctgcatgaagccaccgtgcgcctgatggcaggagccagccccacccgcacccaccagctgctggaacacagcctgmggcggcgcaccacgcagagcaccaagcacggtgagtccacccctccccagctcacaggctgggccaggccctgcgccctaggaagagaggagaagagggg

SEQ ID NO: 20933 - DNA, 201 bp, Homo sapiens
ggagcagcctcaacgtcagtggggccacctctgaccctgccctcaaccacgtgagtgggagctgagttggcccctgggggaggtgctctgcactggtttasgagaacactcccactcacctcatgctgaccctgcgggtggggccatccgaaagacagagaaaccaggacagcagccccctttcaaaaaagttacggctta

SEQ ID NO: 20934 - DNA, 201 bp, Homo sapiens
ggagccttaatcggtagtaaatagaaagtcaaacaaggtgatggttccatagagcatcagataacttttaggcaggcagcttagacagtgctgtagtatamctttttttttttttttttgagtcaggggtcttgctctgttgttccaggcttgagtacagtggtacagtcgtggctcactgcagccttgaactctggcctc

SEQ ID NO: 20935 - DNA, 201 bp, Homo sapiens
ctggctccagggagacgatgcagctgtgcgctctcattttaccaaagtggaacgcatccccaaggccctggaagtgacagagtgcgtaaccctccttggcmactcacttgcttctctccaggggaatcttgtttgagttagcaggagcaaactggactgggtgggcgtgttggggtgaagggtcaggactgcatgacaggt

SEQ ID NO: 20936 - DNA, 201 bp, Homo sapiens
ccaaaattcctccccttgtggccttaataccataagccttgtaggcaggacattttggtcccctgaggtaatatgaggtaatatgaagattggttcagcartagcagagctactgtacttgggggttaatatgcaacttttctgttcttcaagtggtcataaaaattcttagaatcccctggttatgtctcatggttcttt

SEQ ID NO: 20937 - DNA, 201 bp, Homo sapiens
acttttctgttcttcaagtggtcataaaaattcttagaatcccctggttatgtctcatggttctttcatttactcagaaggtatttattgggcatcttgtrttgatcacagcactgtgaatccagaaataaaagccagtgcctttgccaagctacagagttaaagaaaagaaaaatgaaatgaataaaagtaaaagaaaac

SEQ ID NO: 20938 - DNA, 201 bp, Homo sapiens
gttaaagaaaagaaaaatgaaatgaataaaagtaaaagaaaacctgtgcctgtctacaaggagctcaggtcagacgagggcagggattgtggctatcaagyacctcccatatgcctagctaggagccaggcttgggaactctcaaatgggtaattcccggtccttgttatcagctagctcacaacatgctgacctcaggct

SEQ ID NO: 20939 - DNA, 201 bp, Homo sapiens
ggtttcaccatgttagccaggatggtctcgacctcgtgatccgcctgcctcagcctcccaaagtgctgggattacaggcgtgagccaccatgcccaggcctttttttttttttttttttttgagatggagtttcgctcttgttgcccaggctggagtgcaatggaccagtctcagctcactgcaacctctgcctcccgggt

SEQ ID NO: 20940 - DNA, 201 bp, Homo sapiens
catacgtagatcaaaacttaaaacatatttagccatgttaatcctcttgtggtgtagtttatcagcagtgattcttgaagggaggtagtaaccaaggttcygtggctcctgagacttcttggggcctgatttgattaacccaggaagagtctcagacctcatgaagtactgccaggtctggcagcacttggccaaagcggg

SEQ ID NO: 20941 - DNA, 201 bp, Homo sapiens
gactagattattgcagatgaactttttagttgttttctggctttggttattatgaagggtgctgctgtgaacctccttgtacacacatctttcaggaaacrtgactgcatttttaggaatggcatcgctgggtcagaggttgtgcgtatttccaaattgttggccattctccactccatcagcagtgaacaagacttctag

SEQ ID NO: 20942 - DNA, 201 bp, Homo sapiens
ggtgtcactgtttcttaccaatacatgaacctgtcaagcactgcacacctcaagctttggaatcagactagcaaccatcactctctctcttttccacattrattttcacacagtactatgacagatatcacatctccaaaggaagctagtgtggtctcaatgctgaggctgcatgctctccccatctagtcacttacagtg

SEQ ID NO: 20943 - DNA, 201 bp, Homo sapiens
tttctgttctccatattttctgctgtggatcctgaacatatattgggttggggggagggggggcatgtattattaatcttttttttaattttttttttttggagacagttttgctcttgttgcccaggttggagtgcagtggcgtgatcttggctccctgcaacccccgcctaccaggttcaagcgattctcctgcctcag

SEQ ID NO: 20944 - DNA, 201 bp, Homo sapiens
gagccagttgttgggggcaagtggagggctggcctctgtgaaaatggtttagactagaggttcccaaacttgctcaactcatgactcaagattcccaaacwttctctactcactatgtctcagtaaatttttcatggcatcccttagccaaaagaaatacctaacggttctggttttcgttttttgaaacagtgtcttgct

SEQ ID NO: 20945 - DNA, 201 bp, Homo sapiens
caaagaggaaggacggactattggtgcccctggtcccagtgattagaaatgtaagtgaaacaccccacctcatctcataagctgctttgagattatgagtrtgtgtctatagaacaggttgttttctctcagactcaggcagtgtctccaggttccccctggagagagatagtcttctctgtctgtgtcctcgagtggcac

SEQ ID NO: 20946 - DNA, 201 bp, Homo sapiens
gttcttgtacttgttgggcagctctaatatgaaagataaaatgaacgaaaagtacaaatgaagaaagtttaggtgactattcctctgatcttgaggatgarggtttttcttaagcgttacacagaagccatgtaatttcactatacaatgtaaaaatggtgtatagtcagttctgctatagttcatcatgtgcatttctaa

SEQ ID NO: 20947 - DNA, 201 bp, Homo sapiens
gagtccgtttgtttgtttgtttgtttgtttgtttgaaccaaagctcagggaggttgagtaacttgcttaaggtcacaagcctgatcagaaattgtcagtgrctaagctgggtgtgcagctctgctctctctaacattcagagcccatggtccttacatcacacagcaataaattgtgattaagctccaagggtactcttag

SEQ ID NO: 20948 - DNA, 201 bp, Homo sapiens
agaaaagtcgggggtgagggcaccatggagaactcaagttgggccagcaggtcctctgtgcaagtgtcctgctctgcacaacacgacagttgtcccagcarctgtcagcactgtgtccgggtcctcctccctgcagccttcatggcgccacaggctgaaaagaagagacgagagcagtgtggcccccagcatcttcagaag

SEQ ID NO: 20949 - DNA, 201 bp, Homo sapiens
tagtcttttcctttacagttagacattttaagtcctgttcaataaatctttgtcctacctcaaagtcatgaagatattctcctatgttgtctgctagacgytttattttttactctttacacatatgtacctaatccacctggaattaatttttataagagttggaggtaggagtgcaagatctgtttttctccataagga

SEQ ID NO: 20950 - DNA, 201 bp, Homo sapiens
gcactgggattacaggcatgagccaccacaaccggtctcagcagctttctgtttgtcagatatacaaatataccccaggctccaggcccccacatcccccaaaaaacacacacacacacacacacacagcatcagagacctgagaaggacatcttggtggaggtttgggggaatggagatggttccttttatttttttata

SEQ ID NO: 20951 - DNA, 201 bp, Homo sapiens
cgcttgagcctgggaggtggaggctgcagtgagctgaaattgcaacactgcactccaacctgggtgacagagcaataccctatctcaaaaaaaagagagasagagtctcgctgtgttgcccaggctgttctcaaactcctgacctcaagtgaccctcccaccttggcctcacaatgcactgggattacaggcatgagccac

SEQ ID NO: 20952 - DNA, 201 bp, Homo sapiens
tagaaaacagcatcttgtcaaggcatatggtctcatttgaagaataatttaataatttggataggaaggtatacttgtaaaatacagccagtcaaaaataycttttccccattccccttgatgcgtccattacatacatgttcaccctgagattgatcttccatcagcattgaaatgaacattgaaagtaataagatgggc

SEQ ID NO: 20953 - DNA, 201 bp, Homo sapiens
gttgggttcaggatctagtttggaacagtgatgaaatttcgagctgctgaaccagatatggaactgctttgctaacctggtgtctgcccagcttaagcccyctccatcccacagctgtgaaaggaaatcatgcttcttcccaagtgctaacattcctgtgaggccttacactttacccaagtcctcctgatacatttgtct

SEQ ID NO: 20954 - DNA, 201 bp, Homo sapiens
cctgtgctgatctttcccagtctcccccaaagcccacctccaccatggtgctttctgcaccccacagtggctgcagccagcattctgccaccttggtgttrcccctggtccttgtccttccacagagctacttcctcagccgagcccagagcctgtgtggccccgagcacagtgctgttcctgactccctgcgctggctct

SEQ ID NO: 20955 - DNA, 201 bp, Homo sapiens
aagaaagagtccagttgactaggctagtaatcttattaactggatagttgcactcttatgtttaggccccaaaatgctttgtattatttcacttcttcctmaacaatcctgtgagatactcttattacctctattttaatacggtaattaaagaagccgaggccaggagatgttgacttatctaaggccactcaccttaga

SEQ ID NO: 20956 - DNA, 201 bp, Homo sapiens
ctgtaatcccagcactttggaaggctgaggcgggtggatcacgaggtcaggggttcgagaccagcctgaccaacatggtgaaaccccgtctctactgggcktggtggcgggcgcctgtaatcccagctactcaggaggctgaggcaggagaagtgcttgaacccaggaggtggaggttgcagtgagccgagatcccgccac

SEQ ID NO: 20957 - DNA, 201 bp, Homo sapiens
ctaagttgcaaataccaggtggtgtggtgtgctttgaagctatttattcaacatgtgtttatcaagaagtgtctgtccaggcgcagtagctcatacctgtratcctagcactttgggaggccaagatgagaggatcccttgagcccaggagtttgagactagcctgggcaacatacctggacaacatagtgagaccccatt

SEQ ID NO: 20958 - DNA, 201 bp, Homo sapiens
taagttgcaaataccaggtggtgtggtgtgctttgaagctatttattcaacatgtgtttatcaagaagtgtctgtccaggcgcagtagctcatacctgtartcctagcactttgggaggccaagatgagaggatcccttgagcccaggagtttgagactagcctgggcaacatacctggacaacatagtgagaccccattt

SEQ ID NO: 20959 - DNA, 201 bp, Homo sapiens
agtagctcatacctgtaatcctagcactttgggaggccaagatgagaggatcccttgagcccaggagtttgagactagcctgggcaacatacctggacaayatagtgagaccccatttctgtaaaaaaaaaaaaaatacaaaaattagccaggcttggtggcaccagcctgtagtcccaactacttgggaggctgaggtgg

SEQ ID NO: 20960 - DNA, 201 bp, Homo sapiens
cccatttctgtaaaaaaaaaaaaaatacaaaaattagccaggcttggtggcaccagcctgtagtcccaactacttgggaggctgaggtgggaggatcactygagcctaagaggctgaagatacagtgagtcaagatcacaccactgcacttcagcctcgtcaacagagcgagaccctgtctcaaaaaaaaaaaaatacata

SEQ ID NO: 20961 - DNA, 201 bp, Homo sapiens
tcccaacactttggaaggccgaggcaggtagatcacttgaggtcaggagttcgagaccagcctgaccaacatggtgaaaccctgtctctactaaaaatacaaaaaaaaaaaaaaaaaaagtgctactctgagggaactctgaccagcatttgctcatagaacaaacgcacgcagtacaatctcaatcgagtaaaaagtctg

SEQ ID NO: 20962 - DNA, 201 bp, Homo sapiens
aagatcacaccactgcacttcagcctcgtcaacagagcgagaccctgtctcaaaaaaaaaaaaatacatacacacacacacacacacacacacacacacaygtatatgtatatatattttttaaattaagaaaaaatgtctgctctatgctggacacttaaagtgacttcccctgggtcctagggtactttctgagcctta

SEQ ID NO: 20963 - DNA, 201 bp, Homo sapiens
agcatcagataacttttaggcaggcagcttagacagtgctgtagtataactttttttttttttttttgagtcaggggtcttgctctgttgttccaggcttkagtacagtggtacagtcgtggctcactgcagccttgaactctggcctcaagtgatcctcccacctcagcctcccaagtagctgggactacaggcatgtgc

SEQ ID NO: 20964 - DNA, 201 bp, Homo sapiens
ctttgcctctgtttaaactatattaatataaggagagtcttgcagtatacactgttttgtgtctgacttattttgctcaatatcatgtgtaagaatcattwtgttgttatgtagaattatagattgttcgttctcatatttatagtgttccattgtatgactagattattgcagatgaactttttagttgttttctggctt

SEQ ID NO: 20965 - DNA, 201 bp, Homo sapiens
tactttttaaaaatcattactactaatttgctcagtttttcttcttgattgttgttctcaaagtctgtttcttttatttattttcattattattattattwtttttttttttgagacggagtctcgctctgtcgcccaggctggagtgcagtggcgcaaactcggctcagtgcaagctccgcctcccgggttcatggcatt

SEQ ID NO: 20966 - DNA, 201 bp, Homo sapiens
gctttgcctctgtttaaactatattaatataaggagagtcttgcagtatacactgttttgtgtctgacttattttgctcaatatcatgtgtaagaatcatkatgttgttatgtagaattatagattgttcgttctcatatttatagtgttccattgtatgactagattattgcagatgaactttttagttgttttctggct

SEQ ID NO: 20967 - DNA, 201 bp, Homo sapiens
gcccacgactctgaccagcacccacactcaggctctggccgcagtgtcctgtcattcgagtcaggtaggtggaggccccttgccccacctgggcatggctrgaccactatggcaggagaaggaccctgtgtacaaacttcttggcttggctaccaggtcccaaagggcttttatagtgggcccccacctgcttgcttctga

SEQ ID NO: 20968 - DNA, 201 bp, Homo sapiens
ggataggtgaaaaggagaccctcagggccattcagaagaacaccctcatctaaagaacagataggccatcgcggtggctcacacctgtaatcccagcactytgggaggccaaggcaggtggatcacctgaggtcaggagttcgagacctgcctggccaacatggcaaaaccctgtctctactaaaaatacaaaaattagcc

SEQ ID NO: 20969 - DNA, 201 bp, Homo sapiens
ttttggggtagatggagttttgctctttttgctctttttgcctaggctggagtgcagtggcacagtctcagctcactgcaccctccacctcctgggttcargtgattcttctgcctcagcctcccaagtagctgcaggcatgtgccaccatgcccagctaatttttttatttttagtagagacggggtttcaccatgttgg

SEQ ID NO: 20970 - DNA, 201 bp, Homo sapiens
cagtgcagagaggccactgttgcccccaaaactcatgtgcactggagcatcttgcccctgtgtgctagcattttatccactttccttccagccacctccasccccaccatcaaccctggcaactttgtcctgtaactaaaatagcctttagcacatggcataaccggagagcttttgacattcctctttggagattcatgt

SEQ ID NO: 20971 - DNA, 201 bp, Homo sapiens
ttgtctaacacaaggtgcataataaatacaaaatataagaataaatgacctttgtaaactaggtttcccagcccctaatagggctgggtaacaaatacctrttaaaggattattgactgaatctgtaatttggagaaactgtaaccctatttggaggcttcacattctttattcttgaccagaattaatttaaccagattt

SEQ ID NO: 20972 - DNA, 201 bp, Homo sapiens
taccttgtgggtatctcagcctcctagccagccatggtgggactcccatggggtggaagaacctgcgccttcaacccacaagggttttatttctgcccctrccacctgcctgtgctgtattccctatacaagctgctgtccctgtcagagccttgctttctcacctgcagaatggggagggcttgtctcccacctcctggg

SEQ ID NO: 20973 - DNA, 201 bp, Homo sapiens
accagcccatatctttcccacaaaagggtttcaagagtacttgacaaaatgagatcagtgcacccacatgcctgtgtagtgggtgctctggaagtaccgcyaacattgacctgcataagggtctacccttcaccaagcacttcggataaattatcttattaatcctcagggcaaagaggccaagtgtgtattttcaaagca

SEQ ID NO: 20974 - DNA, 201 bp, Homo sapiens
tgtgcacattttgtgcattcctgcatggctcatttcagccgaatatggttttctgcacttcctagtgtttttctcatgcataagcaaatgcaaaatttatrttatgctcagattgtttctggatgtatctgatgcatttgaacaaattcacattttcaaagtaagagttaaagcaaaagtgtcaaaaaaaaaaaacccact

SEQ ID NO: 20975 - DNA, 201 bp, Homo sapiens
gctcatttcaccaggactcccagcaaccgataaaacagaccaaaattcctccccttgtggccttaataccataagccttgtaggcaggacattttggtccmctgaggtaatatgaggtaatatgaagattggttcagcaatagcagagctactgtacttgggggttaatatgcaacttttctgttcttcaagtggtcataa

SEQ ID NO: 20976 - DNA, 201 bp, Homo sapiens
tcagaccccatcagcggcctcctccaggaatccttttttttaatttttttatcttttgaagcagagtctcgctctgttgtccaggctggagtgcaatggcrcaatcttggctcactgcaacctccacctccccggttcaagtgattctccagcctcagcttccctagtagctgggattataaggtgcctgccaccacacct

SEQ ID NO: 20977 - DNA, 201 bp, Homo sapiens
acctgaggagagggggagggggcagttctgcctgggagataagaaaacttttgggaggagatgacactggacttggggcttaaggagaggagtgagggtaggctgtgggggatgctagggaaaggcccccagtagagggaagagtgtcagtgacagcccagagacacggaggaaggatgcctgaggaatacaaagggtaca

SEQ ID NO: 20978 - DNA, 201 bp, Homo sapiens
taaaatccaagaactggaagcaactcaaatgtccatccacaggaaaataagcacattgtgatatattcatacaatgaaattatgcctagcaattaaaaaamagaactgctgacaggcacggtggctcacgcctgtaatctcagcactttgggaggccaagaggggtggatcacctgaggtcaggagtttgagaccagcctg

SEQ ID NO: 20979 - DNA, 201 bp, Homo sapiens; identical to SEQ ID NO: 5494

SEQ ID NO: 20980 - DNA, 201 bp, Homo sapiens
tgaggcaggagaattgcttgaacctgagaggtggaagctgcagtgagccgagatcgcaccactgcactccagcctggatgacagaacgagactgactctcaaaaaaaaaaaaaaaagctactgatgcatgaaacaacatggggctgtccctcagaaatagtgtgtcaagccaccgggcgcagtggctcacacctgtaatcc

SEQ ID NO: 20981 - DNA, 201 bp, Homo sapiens
cactgggattacaggcatgagccaccacaaccggtctcagcagctttctgtttgtcagatatacaaatataccccaggctccaggcccccacatcccccaaaaaacacacacacacacacacacacagcatcagagacctgagaaggacatcttggtggaggtttgggggaatggagatggttccttttatttttttatag

SEQ ID NO: 20982 - DNA, 201 bp, Homo sapiens
ggattacaggcatgagccaccacaaccggtctcagcagctttctgtttgtcagatatacaaatataccccaggctccaggcccccacatcccccaaaaaacacacacacacacacacacacagcatcagagacctgagaaggacatcttggtggaggtttgggggaatggagatggttccttttatttttttatagtggtg

SEQ ID NO: 20983 - DNA, 201 bp, Homo sapiens
attacaggcatgagccaccacaaccggtctcagcagctttctgtttgtcagatatacaaatataccccaggctccaggcccccacatcccccaaaaaacacacacacacacacacacacagcatcagagacctgagaaggacatcttggtggaggtttgggggaatggagatggttccttttatttttttatagtggtggt

SEQ ID NO: 20984 - DNA, 201 bp, Homo sapiens; identical to SEQ ID NO: 5521

SEQ ID NO: 20985 - DNA, 201 bp, Homo sapiens
cggaggttgcagtgagccgaaattgccccattgcactccagcctggatgacagagccagaccctgtctcaaaaaaaagaaaagaaaaaagaagtcccaaasagagtgagctagacattgaaaaggttctaagcaaaggaacagcatgtgtgaaatggcaaggcttttggtgtgttaggttatttgggatcgggggaatctt

SEQ ID NO: 20986 - DNA, 201 bp, Homo sapiens
tttggcagcattaataaagaggtcaaaaaaatgaaaaaagagcaaactcctcttggaatttgagtgaaattataatttaatgaaagtgaatgcctcataattttttttttttttttttgagatggagtcttgctctgtcgcccaggctggagtgcagtggcacagtcttggctcactgtaagctccgcctcccgagttccc

SEQ ID NO: 20987 - DNA, 201 bp, Homo sapiens
aacactttatacagtgcctggtataccaaaggtagtcagtaaatgtttgttgaatgaataaatgtgcattaaaatgctataagtgctcttatttaaatgtyttagtgttttatgttaataaaagaatatgtatttttactcagttgaattgtgactatagctatagatgtgcctatcatattgatcttctatgtagttgta

SEQ ID NO: 20988 - DNA, 201 bp, Homo sapiens
tttgtgtatttttttcatcttttttccccccaccttttgaataaggttgtggcgtggatttgttttatataattctaacataattatgtatcctgtgtttrtttatttggctctccatcttgaacatttttcccacttctgtagttgccatttagaaatatatatatatatatatatatatattttttttttttttttttt

SEQ ID NO: 20989 - DNA, 201 bp, Homo sapiens
ttaggtattaaatgtttatcatttttgttgtttcttaatagaattatttgtttttagtttttcttagctatgattaaaatttttaaatgtagactacaagyggttgttacccattcaatgactattaaactttagtttttcatcaataaggtgatgacttcactatttctatgtgtttttttttttttaaggttatcctgt

SEQ ID NO: 20990 - DNA, 201 bp, Homo sapiens
atttgttttatataattctaacataattatgtatcctgtgtttatttatttggctctccatcttgaacatttttcccacttctgtagttgccatttagaaatatatatatatatatatatatatatttttttttttttttttttttgagacagtcttgctctgtcagccaggctggagtacagtggcatgatctcgactca

SEQ ID NO: 20991 - DNA, 201 bp, Homo sapiens
tttgttttatataattctaacataattatgtatcctgtgtttatttatttggctctccatcttgaacatttttcccacttctgtagttgccatttagaaatatatatatatatatatatatatatttttttttttttttttttttgagacagtcttgctctgtcagccaggctggagtacagtggcatgatctcgactcac

SEQ ID NO: 20992 - DNA, 201 bp, Homo sapiens
agaaatgacgcacatgggttaaatggtatatggcaaactaacagtttgagtatggacaaaaattcaattagaagaaaggatcccagaggggctaataattwaaaaaaaaaaaaagtttgctagagcagtcaggacactaattaaaaggaaaagtagaggctgggcaccagcaccttgggaggccaaggtgggtggatcacc

SEQ ID NO: 20993 - DNA, 201 bp, Homo sapiens
attaccttatttctatactactatgttaaacctactactttaatgatctggctaccgtctgccaaatgtcacttttcaagtgagaacagaagaatgagatwgtgaagattctgtggacaatgtctatataatcatttaagtgttaaatataaactaaatgacaatagcagcttgtaaattaatgctaattctggctgggag

SEQ ID NO: 20994 - DNA, 201 bp, Homo sapiens
ttgttttatataattctaacataattatgtatcctgtgtttatttatttggctctccatcttgaacatttttcccacttctgtagttgccatttagaaatatatatatatatatatatatatatttttttttttttttttttttgagacagtcttgctctgtcagccaggctggagtacagtggcatgatctcgactcact

SEQ ID NO: 20995 - DNA, 201 bp, Homo sapiens
ctggagtttgaacctaggtttctgacttctacattcctgtactccacctatcaagaagtacaaagaagggccttttcagcctagaaacacatgtgataaarctcctatgagattgtgctccttgttcatctgtcatctgctgtgctggtaaggtggctagtaatagtgggtacccaattaacatgctgaataatgtgaaaa

SEQ ID NO: 20996 - DNA, 201 bp, Homo sapiens
gctgtggtcagagaattgcttgagcctgagaggtcaaggctgcagtgagccgtggttgtgtcactgcactccagcctgggcaacagagcgagaccctgtckcaaaaaataaaaacaaataaattcatcatatctttgactaataaacagaagaacccccttccccagttaccataggtgattgatttgattaagatttata

SEQ ID NO: 20997 - DNA, 201 bp, Homo sapiens
tgttttatataattctaacataattatgtatcctgtgtttatttatttggctctccatcttgaacatttttcccacttctgtagttgccatttagaaatatatatatatatatatatatatatttttttttttttttttttttgagacagtcttgctctgtcagccaggctggagtacagtggcatgatctcgactcactg

SEQ ID NO: 20998 - DNA, 201 bp, Homo sapiens
ataattttactcagaatcactagggcagattaggaggcttataagcctaggaatttgcaggaaaacccctcctcttcttttgtgcgtgtatgtgtgtgtgygtgtatgcttcattttcatttgcagagtggctgaagacagtaaaaagaatatgaactttaaaaaaattgttagatttatgtttcaatcagagatttgtca

SEQ ID NO: 20999 - DNA, 201 bp, Homo sapiens
aattatgtatcctgtgtttatttatttggctctccatcttgaacatttttcccacttctgtagttgccatttagaaatatatatatatatatatatatatatttttttttttttttttttttgagacagtcttgctctgtcagccaggctggagtacagtggcatgatctcgactcactgcaacctccctcagccaggctg

SEQ ID NO: 21000 - DNA, 201 bp, Homo sapiens
ttatgtatcctgtgtttatttatttggctctccatcttgaacatttttcccacttctgtagttgccatttagaaatatatatatatatatatatatatatwtttttttttttttttttttgagacagtcttgctctgtcagccaggctggagtacagtggcatgatctcgactcactgcaacctccctcagccaggctgga

SEQ ID NO: 21001 - DNA, 201 bp, Homo sapiens
gatagattaataagaacatcttatatttgaatggtacgagttacattcgggaaataattaaatttaaattctaggggctatgcttgtgtttctattctctrttctgttaacagtgtgttggcctagtgccaaagccaagaaattctgatctaagaattatgttgtatcttgtagagcagtcaacttgtaatattatttttc

SEQ ID NO: 21002 - DNA, 201 bp, Homo sapiens; identical to SEQ ID NO: 5519

SEQ ID NO: 21003 - DNA, 201 bp, Homo sapiens
agaggcatctgcctcaccctaagatcagaaaaaacttcccaaagaggccaggcacaatgtctctcacctgtaatcccagcaccttgggaggcctaggcagrcggattgtttgatctcaggagtttgagaccagcctggccaacatggcgaaaccctgtctctacaaacaatacaaaagttagctgggcgtggtgccgcatg

SEQ ID NO: 21004 - DNA, 201 bp, Homo sapiens
gcaagagcaggaaaggtagggatggagtagatgggcagatttgagaaatatttaatgggaaaattggcaacacttaatggttgattatgagggagaagttmtaggtagctcccaagtagtctaggtgattggtacatagtggtggcagctgagacaaaatacagggaggggcatttttaagtgggttccagacaaaatctg

SEQ ID NO: 21005 - DNA, 201 bp, Homo sapiens
gctctggttcctgttgcggccggtaagtatttgccagttgtggggctatttgcgcaactttggcccaggccggagggcgacgggccgcgggcctggcggastgcggggccggaggggcgccgatccgtgcggggagccggagcgcggcggacgcgctgcgaggacccggtgacgggcggctgccaggccgcctgcttgttg

SEQ ID NO: 21006 - DNA, 201 bp, Homo sapiens
ctgggattacaggcgtgagccacggtgcccggcctcaaaaatttttaatgaaaaaattatcttcaagagataagctaaaagtctcacaggaatttagatcyctcctcccctgccgcatactcctctacctgtttttggtgtagtaatccttcttaaagcttttctgggctaggcacagtggtttatacctgtaatctcagc

SEQ ID NO: 21007 - DNA, 201 bp, Homo sapiens
ctttcattactcatatccttcaagagttgttttctttttttttttttcttttgagacagagtcttgctctgtcatccagactggagtgcagtggcgtgacrcaactcactacagcctctacctgtcgggctcaagtgatccacccactttagcctcccaagtaactgggactacaggtgatgccaccacacctggttaatt

SEQ ID NO: 21008 - DNA, 201 bp, Homo sapiens
gactttaatatttttgttttacataggtctctaattaacagaagatggcaaagcccagccacagcagctatgtccttcagcagctaaacaaccaaagagartggggttttctctgtgactgctgtattgcaattgatgacatttactttcaagcacacaaggcagttctagctgcctgtagctcctattttagaatgtttt

SEQ ID NO: 21009 - DNA, 201 bp, Homo sapiens
atgactttgggagctagaaagggggttcctcctcttaaagaaacaggaaactgggccgggcgcagtggctcacgcctgtaatcccaacactttgggaggcygaggcgggtggatcacccgaggtcaggagttcgagaccagcctggccaacatggcgaaaccccatctctactaaaagtacaaaaattagcctggcgtggt

SEQ ID NO: 21010 - DNA, 201 bp, Homo sapiens
ccagagataatcaccatgtacagttaattccttgtttaaaacgagagaaggcaacatttgatcacagctgtgtgtgcctcactctgcctggggatggcctrtggtgattcatggactcatgttctctgttcacattactcaggttggtaagaattgccaggtagaggaaaggggagtgttttgcattgggctgatttaaaa

SEQ ID NO: 21011 - DNA, 201 bp, Homo sapiens
acattctaactctatagaattattgcttctttgataattcaagaaaagacaaaggcactgatcaaacttgtttggtgccatttctatataatctaataaggttgttgttgttgttgttgttgttgttgttttgaaacggagtctcgctctgtcgcccaggctggagtgcagtggtgcgatctcggctcactgcaagctccg

SEQ ID NO: 21012 - DNA, 201 bp, Homo sapiens
actaaatgtcagacattcagtaatgactgagatactgccctgatgtcaaggagcttgcagtaaagcaggggagccaaataattgcaatatctgccttaagygtggtaacagagcatcacagttgggatgatgcattattggtaccatattgttgtatgtataggctgttttggcagcacagaagaggcatctgcctcaccc

SEQ ID NO: 21013 - DNA, 201 bp, Homo sapiens
cattctaactctatagaattattgcttctttgataattcaagaaaagacaaaggcactgatcaaacttgtttggtgccatttctatataatctaataaggttgttgttgttgttgttgttgttgttgttttgaaacggagtctcgctctgtcgcccaggctggagtgcagtggtgcgatctcggctcactgcaagctccgc

SEQ ID NO: 21014 - DNA, 201 bp, Homo sapiens
gatctaggaaaagtaaaaattcctcaaatgaatacagaatacttgtgctactgctgatgatcaacactttatacagtgcctggtataccaaaggtagtcartaaatgtttgttgaatgaataaatgtgcattaaaatgctataagtgctcttatttaaatgttttagtgttttatgttaataaaagaatatgtatttttac

SEQ ID NO: 21015 - DNA, 201 bp, Homo sapiens
ggtagaaaggattaccatcccttcttagagaattgaagcacaaattgactaagcaaccttctcaaggtcacacacttaataagtggcagagccagaatttraacccaggcagtctggttagtttgtgctttaacacctactttatgtagctgttctgattattaaaatacagtgtaaaaagtgcaaaataaagaggtaata

SEQ ID NO: 21016 - DNA, 201 bp, Homo sapiens
attctaactctatagaattattgcttctttgataattcaagaaaagacaaaggcactgatcaaacttgtttggtgccatttctatataatctaataaggttgttgttgttgttgttgttgttgttgttttgaaacggagtctcgctctgtcgcccaggctggagtgcagtggtgcgatctcggctcactgcaagctccgcc

SEQ ID NO: 21017 - DNA, 201 bp, Homo sapiens
tgacacagggtctacataattacatgtgaattaaaacattggcaaaactgacccaccaataaacacatctattgaatagaatgccttttaatgtgaattacttgcaatgtagtacccttttcataatgaaagggattttaattaactcctaattttaaaaatataaatttgtgattctgaacactaatagcattgctcttt

SEQ ID NO: 21018 - DNA, 201 bp, Homo sapiens
aaattttctaaacttgatcgtgtttgtcacttaagtgcgttgaaataaaacctcttatctttgggagcctctacaactggttattcctggaagtttcaagragaaacctagagaatgtaatagagattggaccctataccctgcaagatggtattctaggaaagaattttgccaatgtgacattatttttatagatggcag

SEQ ID NO: 21019 - DNA, 201 bp, Homo sapiens
attcaagaaaagacaaaggcactgatcaaacttgtttggtgccatttctatataatctaataaggttgttgttgttgttgttgttgttgttgttttgaaayggagtctcgctctgtcgcccaggctggagtgcagtggtgcgatctcggctcactgcaagctccgcctcccaggttcatgccagtctcccgcctcagcctc

SEQ ID NO: 21020 - DNA, 201 bp, Homo sapiens
gttgcccaggctggagtgcagtggctcaatctcagttcactgcaacctctgcctccaggttcaagcgattctcctgcctcagccccccaagtagctgggaytacaggcatccactatcatgcccggctgatttttgtatttttgtagagacagagtttcaccatgttggtcaggctggtcttgaactcctgacctcaggtg

SEQ ID NO: 21021 - DNA, 201 bp, Homo sapiens
tggtttcgatctcctgacctcgtgatccgcccgcctcggcctcccaaagtgctgggattacaggtgtgagccaccacacccagccctaataaggttttttwaaatttttatttttgggatagagtctcactctgtcacacaagctagagtacagtggcgtgatcatggctcaccacaacctcaaaatcctgggctcaagcc

SEQ ID NO: 21022 - DNA, 201 bp, Homo sapiens
aaaatttttaaatgtagactacaagtggttgttacccattcaatgactattaaactttagtttttcatcaataaggtgatgacttcactatttctatgtgtttttttttttttaaggttatcctgtgaaattttaaacccagaatcattggccatttctgtttaaattttaaaaattccttaagtaattatttgaaactat

SEQ ID NO: 21023 - DNA, 201 bp, Homo sapiens
tcataattttttttttttttttttgagatggagtcttgctctgtcgcccaggctggagtgcagtggcacagtcttggctcactgtaagctccgcctcccgrgttcccgccattctcccgcctcagcctcccaagtagctgggaatacaggtgcctgccaccacgcccggctaattttttgtatttttagtagagacagggt

SEQ ID NO: 21024 - DNA, 201 bp, Homo sapiens
ctattcagaaggtgtgaggtggaaggattgcttggagaatgagtacccatattaaagcaggaacagaatgctattgaggacattctgagctatgatggcaygccagcctgggtaacagagtaagaccctgtctcaaaaaaataataattaaaatttaagaaaaaagcttttctgaatgaggtgtaacaaggacagagtttc

SEQ ID NO: 21025 - DNA, 201 bp, Homo sapiens
ctttatgtcttagaggtggcaggatgggcatataggtagtaaaaggggcgtatgacccatatgtgatcgctgaggaatggataaaaagcaaatagaagtaygtaaacgtagatacccttaattactactacagagcttgaagagtgaacattttatttctctaaacagcttgttacatgttctttttaagttcagtcaaat

SEQ ID NO: 21026 - DNA, 201 bp, Homo sapiens
gcatatatccatatatatccatatgtgtatatgtgtaatgtatctgtgagagatatatatacatctccctatacatctgcctggaatagagcctggcatayagtgagacataacaaatgttagctattcatattattattgtattacagttgtcatttactctactttgataaccttcatctaccagtccagtaaagcaaa

SEQ ID NO: 21027 - DNA, 201 bp, Homo sapiens
tctatactactatgttaaacctactactttaatgatctggctaccgtctgccaaatgtcacttttcaagtgagaacagaagaatgagattgtgaagattcygtggacaatgtctatataatcatttaagtgttaaatataaactaaatgacaatagcagcttgtaaattaatgctaattctggctgggagcagtggctcag

SEQ ID NO: 21028 - DNA, 201 bp, Homo sapiens
  misc_feature (1)...(201): n = A,T,C or G, or insertion/deletion polymorphism (see Tables 1-2)
ttataaaatccatgctctttgaaaaattcagcctgtattgaagtacataaaatacaaaaatgaaagtcattttgactcccactccccagagataatcaccntgtacagttaattccttgtttaaaacgagagaaggcaacatttgatcacagctgtgtgtgcctcactctgcctggggatggcctgtggtgattcatggac

SEQ ID NO: 21029 - DNA, 201 bp, Homo sapiens; identical to SEQ ID NO: 5520

SEQ ID NO: 21030 - DNA, 201 bp, Homo sapiens
actttaatatttttgtttaggattttaagtatctacatttaggtattaaatgtttatcatttttgttgtttcttaatagaattatttgtttttagtttttyttagctatgattaaaatttttaaatgtagactacaagtggttgttacccattcaatgactattaaactttagtttttcatcaataaggtgatgacttcac

SEQ ID NO: 21031 - DNA, 201 bp, Homo sapiens
aaggatagatctaaattgtttctgaaatgtttaaatttcaaaccccgcatagtcaaggataataaaacagactcatctttttttgccctcttgttaaattmtaagcttcacaggcatttgaatacatctaaaaaatttggtttgtgagccttagaatttaaccacttacaaaactcttgagctccctccacttctgaggac

SEQ ID NO: 21032 - DNA, 201 bp, Homo sapiens
atatacctgggaaatagctggttaagcttcaccacaaaggatagatctaaattgtttctgaaatgtttaaatttcaaaccccgcatagtcaaggataataraacagactcatctttttttgccctcttgttaaattctaagcttcacaggcatttgaatacatctaaaaaatttggtttgtgagccttagaatttaaccac

SEQ ID NO: 21033 - DNA, 201 bp, Homo sapiens
aaattaaagttgatgaaagaaataacagattccccggctctatatacctgggaaatagctggttaagcttcaccacaaaggatagatctaaattgtttctraaatgtttaaatttcaaaccccgcatagtcaaggataataaaacagactcatctttttttgccctcttgttaaattctaagcttcacaggcatttgaata

SEQ ID NO: 21034 - DNA, 201 bp, Homo sapiens
tccatttttacactgcactcttattctctagaaaactgtattctctcttccttagcagccttttgtgacaaaaagatgagcaaaaatgtcacactaggtamaatttcttccaggcatattcatacctttcatcttactccatacagttgttttaggtggtttctctagtatagaaatgcccagtttctctatggcttgtaa

SEQ ID NO: 21035 - DNA, 201 bp, Homo sapiens
atccatgatgttagcttttcctctataaatcaacttaactctcttttataatggtgacacttacaaagctaaaaccccaggaaaattaaagttgatgaaakaaataacagattccccggctctatatacctgggaaatagctggttaagcttcaccacaaaggatagatctaaattgtttctgaaatgtttaaatttcaaa

SEQ ID NO: 21036 - DNA, 201 bp, Homo sapiens
tggcacagttttcacttttttcctgatccataaaaccagcaaagtggatacattcagtgttctataactacatttaagatccatgatgttagcttttcctytataaatcaacttaactctcttttataatggtgacacttacaaagctaaaaccccaggaaaattaaagttgatgaaagaaataacagattccccggctct

SEQ ID NO: 21037 - DNA, 201 bp, Homo sapiens
gcatcaaactacagtttgcttctacttggaccttaactttctcaaataatgcaagagcttttgttttatactatgaccctttgatatccttgtcttttctrgctttttctagtttttctcaggtgctcccccaacctgttccacacaggatttgtaacttcaggtcatttgcatggttatcagaatgccccttcgctaatg

SEQ ID NO: 21038 - DNA, 201 bp, Homo sapiens
gatcgtttcaatttcttcaaggattagagttcccgtttgaatagcagaatgcccattatctaatccaagttctactgaaatcactttctctccagaagttrtgctattgctcacatttgattcacagacctcatcaccatctttccgtgagatgccttcacttagatcctgggttgacttagcctttgttgcctgatcatt

SEQ ID NO: 21039 - DNA, 201 bp, Homo sapiens
cccgccgccgggtgcgccccctccccaccgcgcggggacagacagcaggcagcgccaatgcgagcggagcggagcgggcgggcaggggcggggcgaccgcsggaggcgcggggcggcgcgggcgccgggacccacctgcagcagcagcctgcctgcctgccgcggggaagcccatcgtgctccgcccgggcgccaatctcc

SEQ ID NO: 21040 - DNA, 201 bp, Homo sapiens
tgtggcttgacatctattttaagagttcctgagctactgtgatgataagtcccccaaacatttgatgagagttgggaagccagtatcccctgagcaccagwggatccctgaggaggagtgacatctctagctcagccaggataccgtgttatgttattaacatttatagctaacatcgaatagcagtttccattacaacat

SEQ ID NO: 21041 - DNA, 201 bp, Homo sapiens
aaattatctaatctgaagtagagaaataagttattgtatatgaaagttctctgtaaacttcagtgctctatgtaagtttcagagtttattactccaggttkctttcatatgtaaagggaagaggtatgtttgggtcttctgatctgcagcttccttaatgtcctgtcctgtcatgtctgtgtctaagctttataccctctg

SEQ ID NO: 21042 - DNA, 201 bp, Homo sapiens
gttttcttttttctcctcctctgtcttattttgtcttttctgttttccaaagattcattcttagcttttttccctcttatttcattctactttttagtctrctttattattttcatacttggttacttcagccttgtcgtttcagaggcctcttctccctctctggctctgctctctctagagccctgtcctgcttcttgt

SEQ ID NO: 21043 - DNA, 201 bp, Homo sapiens
gtgctgggattataggcatttatttaccgttctgctttccctttgctagcaggaattttctttctctctctctctctcttttttttttttttttttttttygctttattgggagaaaaagtgcttagagtgttcagttattttttatatttttctaattcatttcttctctggttacaaatcagtcatgcatggatgtttt

SEQ ID NO: 21044 - DNA, 201 bp, Homo sapiens
agtgctgggattataggcatttatttaccgttctgctttccctttgctagcaggaattttctttctctctctctctctctttttttttttttttttttttktgctttattgggagaaaaagtgcttagagtgttcagttattttttatatttttctaattcatttcttctctggttacaaatcagtcatgcatggatgttt

SEQ ID NO: 21045 - DNA, 201 bp, Homo sapiens
caacaagcaggcggcctggcagccgcccgtcaccgggtcctcgcagcgcgtccgccgcgctccggctccccgcacggatcggcgcccctccggccccgcastccgccaggcccgcggcccgtcgccctccggcctgggccaaagttgcgcaaatagccccacaactggcaaatacttaccggccgcaacaggaaccagagc

SEQ ID NO: 21046 - DNA, 201 bp, Homo sapiens
tgcaggcttttttttttttttttttttttttttttgagacagtcgtgctgtgtcgccaggctggagtgcagtggtgcaatctcagctcactgcaacctccrcctctcgaattcaagtgattctcctgcctcagcctcctgagcatgtgccaccatgcccagctaatttttgtatttttagtagagacagggtttcaccatg

SEQ ID NO: 21047 - DNA, 201 bp, Homo sapiens
tgtacatggttggttggataagacagcaagtgcctcagggcagagtttggataaatggtaagagtttgctagcagctgattggccgtgatagacaacactsatttaaagcagaaatatatctgttcgttgagagttaagaaaatagtggttaactgtatttctattcttatagttccttttaatattagaaattcaaagca

SEQ ID NO: 21048 - DNA, 201 bp, Homo sapiens
gtttctgaagtttcaagtgggcttgcttgctggggttgaacatcttgtttttccttgatcgtttcaatttcttcaaggattagagttcccgtttgaatagsagaatgcccattatctaatccaagttctactgaaatcactttctctccagaagttatgctattgctcacatttgattcacagacctcatcaccatctttc

SEQ ID NO: 21049 - DNA, 201 bp, Homo sapiens
gggtggaggtagagttgtacatggttggttggataagacagcaagtgcctcagggcagagtttggataaatggtaagagtttgctagcagctgattggccrtgatagacaacactcatttaaagcagaaatatatctgttcgttgagagttaagaaaatagtggttaactgtatttctattcttatagttccttttaatat

SEQ ID NO: 21050 - DNA, 201 bp, Homo sapiens
gtgccaggcccactcattattctttgacacaggaaatccttgtatatagctaaagggtggaggtagagttgtacatggttggttggataagacagcaagtrcctcagggcagagtttggataaatggtaagagtttgctagcagctgattggccgtgatagacaacactcatttaaagcagaaatatatctgttcgttgag

SEQ ID NO: 21051 - DNA, 201 bp, Homo sapiens
gcactttggttgaagggtgatttaagactagcagacgctgagtaagacaaaaagtggcagcctcctgtttgccagaatggataaaagttgcaagtagaaaygggttctaaagtccatatgtccctgctctttcaggtctcctgctggttttcaaggactgggcttccagccttgggtgctatgcattggagcctggagagg

SEQ ID NO: 21052 - DNA, 201 bp, Homo sapiens
gctgggattataggcatgcgcaaccaagcccggctaattctgtatttttagtagagacggagtttctccatgttggtcaggctggtcttgaactcccaacytcaggtgatctgccagccttggcctcccaaagtgctgggattacaggtgtgagccactgcacccagccaggaacactttcttttaatatcaagcctcaga

SEQ ID NO: 21053 - DNA, 201 bp, Homo sapiens
gcctatgggtaaataaagaaccagggactgtgccacctaatccaaactcagtatttcagaggagagaaggctgccacccagagaagtgaagcaacgggtayttggcagggctgggaggacccagagattgtgactccaagtcctgctttgcaaagagttgaaaggacaaactaaccaaacatctacctgcttcgtgtagac

SEQ ID NO: 21054 - DNA, 201 bp, Homo sapiens
gggtaacccataattttatgaactgtagaaggaactggaaccctgaaaatcagtttatgatctaagtaaatattatcttaggttgggtgtttcatactgtrtgcctctaacagaaagataaagtcattctagaacaatgacggaactaaaatatgaacatttgacagtgtttctcctcacaatgtttcagtgagcactaga

SEQ ID NO: 21055 - DNA, 201 bp, Homo sapiens
gtttcaccacattggccaggctggtctcgaactcctgaccttagctgatccacccgccttggcctcccaaagtgctgggattataggcgtgagccactgcscctggccaaatagcgcttataagagacttaagactaggaaaccactcacgtttaatatcaatatgcatattctgcacactatctgctgaaattgggaaaa

SEQ ID NO: 21056 - DNA, 201 bp, Homo sapiens
  misc_feature (1)...(201): n = A,T,C or G, or insertion/deletion polymorphism (see Tables 1-2)
gtccatgaatcaccacaggccatccccaggcagagtgaggcacacacagctgtgatcaaatgttgccttctctcgttttaaacaaggaattaactgtacanggtgattatctctggggagtgggagtcaaaatgactttcatttttgtattttatgtacttcaatacaggctgaatttttcaaagagcatggattttataa

SEQ ID NO: 21057 - DNA, 201 bp, Homo sapiens
ctggccaacatggcaaaaccccatctatactgaaaatacaaaaaattagccaggcatggtggtgcgaacctgtaatcccagctactcgggaggctgaggtsggagaatcgcttgaacccgggaggcagaggttgcagtgagctgagatcacgtcactacactgcagcctgggcaaaagagcacgactcttgtcccaacccc

SEQ ID NO: 21058 - DNA, 201 bp, Homo sapiens
gaaagtccccgggtcacgcggttgtttgtggggagcctgtgacgctcaggcttgtccctatgcttccgcctacagagtcacaactgcgaactgtggcggcrgcactcagagcgcgggccgacccccgcccggccactgaggcgggcgggcgggagggcgcgcacgtacgcacgcacgcacgcacgcacaccccggccctgg

SEQ ID NO: 21059 - DNA, 201 bp, Homo sapiens
cctttcttgccttttgttcattttttgtacatccacaatctatgaggtatgttacctactgaaatttactttcttttccaactgtggttcaacaactgacyttcttctctcatactttccaacccattccattctgaataagttaagagttttcttaccttcagctcttctcaccttccaatactaagtgaatacagcctg

SEQ ID NO: 21060 - DNA, 201 bp, Homo sapiens
gcctataatcccaggctgaggtggagaggatcacttgaggccaggagttctaaaccaccctgggcaacatagtgagacccccatctctacaggaaataaamaattagctggatatgatggcatgtgcctgtagttccagctacttgggatgctaaggcaggaggattgcttgaggctaggaggttgaggccacagtgagcc

SEQ ID NO: 21061 - DNA, 201 bp, Homo sapiens
ggtggggagtccaggcattgtgctcatctaggatgtaaaaaagcattacaaataaactaatgctgggcacagtggctcacgcctataatcccaggctgagrtggagaggatcacttgaggccaggagttctaaaccaccctgggcaacatagtgagacccccatctctacaggaaataaaaaattagctggatatgatggc

SEQ ID NO: 21062 - DNA, 201 bp, Homo sapiens
tcctttcttgccttttgttcattttttgtacatccacaatctatgaggtatgttacctactgaaatttactttcttttccaactgtggttcaacaactgaytttcttctctcatactttccaacccattccattctgaataagttaagagttttcttaccttcagctcttctcaccttccaatactaagtgaatacagcct

SEQ ID NO: 21063 - DNA, 201 bp, Homo sapiens
ctgtgtgtacatcttcagtgcacagaaacagcctctgaagtgagatcagagaatgtacaatttgtttatcagtaatattactaataaggggaaggaaggcwttagcagcccagagaagagaaagggcacgggaaagccactaatctggagggactcttagcaccaaggtaaaggcactagaccttctctgccagcacatgc

SEQ ID NO: 21064 - DNA, 201 bp, Homo sapiens
agcttatcatgttaatatcactagatacagtgtgccagtaaaatagcttacatatttatctgagcaatactctactgatcttaccatttatcccatcttgrtctctacccattgcctgggcctatagctaccaaaaatgacttataactccttgttaatagctcttacatttcagaggccttctgggaataagccctccaa

SEQ ID NO: 21065 - DNA, 201 bp, Homo sapiens
tgaataatttcatttaaatttagatctccttgttactctgtaggtttgtgtgaactgtagacaattttgtattaataaaaaataatgcgtatatacatacwcacctatctacatttatcttgtcctttttttcagaaccacaatggacactgccagccatagccttgttcttctccagcagctgaacatgcagcgagaatt

SEQ ID NO: 21066 - DNA, 201 bp, Homo sapiens
tgccacctaatccaaactcagtatttcagaggagagaaggctgccacccagagaagtgaagcaacgggtacttggcagggctgggaggacccagagattgygactccaagtcctgctttgcaaagagttgaaaggacaaactaaccaaacatctacctgcttcgtgtagacttcagctttgtgttgagcttcgggaagtaa

SEQ ID NO: 21067 - DNA, 201 bp, Homo sapiens
ttagagtcagagctcacacaagaaaatgtggatactatcctagttgagtagcagcttctctttcagaatttttataccaattctgaaaaagaaaatttgcrtggcatttttaattcataaattattttcctcctcaagtttcattgactttttttcttcacagcttatccatggttttaaggttgtatatattagatcttc

SEQ ID NO: 21068 - DNA, 201 bp, Homo sapiens
tttgcagacagcaaatcacccaccttgaggtcataaaggagctggaagctgctgggtgcttgtgctgctctctggacggcctgagccagggctaaggcacmcttgcccccttctgcccagtgagtgcacttcacggcatcaaaagccccatgttctctggaaaggcggctgatgaggtccagctcagactctgtatccgtc

SEQ ID NO: 21069 - DNA, 201 bp, Homo sapiens
cagtggctcacgcctgtaattccagcactttgggaggccaaggcaggtggatcacgaggtcaggagttcgagaccagcctggccaagatggtgaaaccccrtctctactaaaaaaataagaaaaattagctgggcacggtggcagacgcctgtaatcccagctacttgggaagctgaggcaggagaatcacttgaacccag

SEQ ID NO: 21070 - DNA, 201 bp, Homo sapiens
gccctataattcataaataagctacatgaggaaaaaagccaaattattacccagtaacaacttacctgtttagaataatccattcacctgttctgtttcarggtccaaatcaatatcataaaaacagggccgggtggggagtccaggcattgtgctcatctaggatgtaaaaaagcattacaaataaactaatgctgggca

SEQ ID NO: 21071 - DNA, 201 bp, Homo sapiens
taaattgtttctgaaatgtttaaatttcaaaccccgcatagtcaaggataataaaacagactcatctttttttgccctcttgttaaattctaagcttcacrggcatttgaatacatctaaaaaatttggtttgtgagccttagaatttaaccacttacaaaactcttgagctccctccacttctgaggacgtttcctgaca

SEQ ID NO: 21072 - DNA, 201 bp, Homo sapiens
ctactattagtttcagatcttctgggcaggggctgacttctcttggcttacttatacttcctaactcccagtgggcctgaatagacactggccagactttyaaagtagcttcttgaagatggatggtgatctggaaggaaaaacaagaaataaatgttttctctaagcactgaaatgtttcctgttccttccatactgcac

SEQ ID NO: 21073 - DNA, 201 bp, Homo sapiens
gcaaacacgtctatcgaaatggtctgcgtatctctctatgggttgctagcgctgcttgttgccagttttgaactttaagccaaaagaaatccattatgctyataagcaattgagaactattccttattgagatccaaggtttctcaaaactagcagacctgggagtttgcaagagtttcaggcaaaaaataagatgagctt

SEQ ID NO: 21074 - DNA, 201 bp, Homo sapiens
tagaattctaagtttttccagttatagaatcagtaaaatcaaattgaatataaagtaaatgaaatctgttttaaagcatattctaaactatcacttctgcytacatttcacatgaattcactcctaccaggattatttttaaatattttcttccatataggaaattaatagttactttaatgcataactgtatgttataca

SEQ ID NO: 21075 - DNA, 201 bp, Homo sapiens
ccaccttcaccttacaagaatgagtgctggggagtagaggagttgctcactcgcctcctcagctcacgctttgcaagaccaaaaggaggtacagggcttgyctgcttttaaattttgtttcgttcagtcttgctagctgagctgcccatgtgatttttgcttcagcaacacgatggtaggagttagtatcctttaacttgg

SEQ ID NO: 21076 - DNA, 201 bp, Homo sapiens
taaacagacatgcatgatttatgttaatttatacatgatgagaattaaggctgaaaatgacttctggggaaactcctactattagtttcagatcttctggrcaggggctgacttctcttggcttacttatacttcctaactcccagtgggcctgaatagacactggccagactttcaaagtagcttcttgaagatggatgg

SEQ ID NO: 21077 - DNA, 201 bp, Homo sapiens
cttttgtgtgtgtgtgtgtgtttttgagacagagtctcactgttgcccaggctggagtgcagtggtgtgatcacagctcactgcagccttgacctcccagkcttaagtgatcctcctgcctcagcccctcaagtagttgggagtacaggtgcatgccaccatacctagctaattgttttattttttgtggagatgacgttt

SEQ ID NO: 21078 - DNA, 201 bp, Homo sapiens
caaacttgtttccttttattctgtggaacgtcactaaagtaaacagacatgcatgatttatgttaatttatacatgatgagaattaaggctgaaaatgacktctggggaaactcctactattagtttcagatcttctgggcaggggctgacttctcttggcttacttatacttcctaactcccagtgggcctgaatagaca

SEQ ID NO: 21079 - DNA, 201 bp, Homo sapiens
gtctcatttccctatggttcagtagttcaatataatgggaagaactggtgaaaatgtttatgatccgagggtttggttttgttttttttttttgagacaayttatcaggctagtttaagatgcttcaatatgaaccatttcattgattctaagacacgtttttcacatgctgaaattgtcaatacagatttttagtttgtt

SEQ ID NO: 21080 - DNA, 201 bp, Homo sapiens
agactttgttatatcagaggtcattaaaaagcttatggcataccataagtgctcaataaatacaccttcctcccccaaagcactccaatctccatatgccrttttagcaactccctgtatgttatgtcattttacactgcaatctgtgctgacttcctccaatccagaagtgactgcatttcagtggtagagttttataaa

SEQ ID NO: 21081 - DNA, 201 bp, Homo sapiens
cacttgggcccagaaggtcaaggctgctgtgagccactactgcaccactgcacgccagcctgggcaacaaagtgagaccctgcctcaaaaaaaaaaaaaaattcagtcagccttgttcactcagcaaacacgtctatcgaaatggtctgcgtatctctctatgggttgctagcgctgcttgttgccagttttgaactttaa

SEQ ID NO: 21082 - DNA, 201 bp, Homo sapiens
gagtaagttaactgatcatgctgttcttactcaaacatcttacatagttcacttcaaacacgacactactttttagtcttatattctgtatgctttttgarctgaccacatttcattatttctgttactttttttttctatgccaagctgaatccttctgttatctaactattcatattcttcccagtaattttattcatt

SEQ ID NO: 21083 - DNA, 201 bp, Homo sapiens
atcttggctccctgcaacctccacctctcgggttcaagcaattctcctgcctcagcctcccaagtagctgggattacaggcgtgcaccaccacgcccagcyaatttttgtattttcagtagagatggggtttcaccacattggccaggctggtctcgaactcctgaccttagctgatccacccgccttggcctcccaaagt

SEQ ID NO: 21084 - DNA, 201 bp, Homo sapiens
cctcccacagagtaagttaactgatcatgctgttcttactcaaacatcttacatagttcacttcaaacacgacactactttttagtcttatattctgtatsctttttgaactgaccacatttcattatttctgttactttttttttctatgccaagctgaatccttctgttatctaactattcatattcttcccagtaatt

SEQ ID NO: 21085 - DNA, 201 bp, Homo sapiens
tcccccttattggcaattcttctgcctcagcctcccaagtagctgggattacagacgtctgccaccacgcccaactaatttttgtatttttagtagagacrgtttcaccatattggccaggctggtcttgaactctgacctcaggtgatccaccctcctcggcctcctaaagtgctgggattataggcatttatttaccgt

SEQ ID NO: 21086 - DNA, 201 bp, Homo sapiens
actggagtgcagtggtgcaatcttggctccctgcaacctccacctctcgggttcaagcaattctcctgcctcagcctcccaagtagctgggattacaggcrtgcaccaccacgcccagctaatttttgtattttcagtagagatggggtttcaccacattggccaggctggtctcgaactcctgaccttagctgatccacc

SEQ ID NO: 21087 - DNA, 201 bp, Homo sapiens
ggtttcgccatgttggccaggcgggtcttgaactcctgacctcaagtgatccgcccaccttggcctcccaaagtgctgggattataggtgtgagccactgygcctggtccatgttttctttatccatttgactatccatggacatttgagtttttcccccttattggcaattcttctgcctcagcctcccaagtagctggg

SEQ ID NO: 21088 - DNA, 201 bp, Homo sapiens
catggccactgtgtgggtttgatggtatttctaggtgaggtaggccgcctatggtgtatttttggaactaaaagcctacaccccccagccacccctgaaartttcattgctgttctctattatttgcagcattggttgcttccttatgttaaggcatcaaagtcttctttaacaatctggatatattttagttaagggtaa

SEQ ID NO: 21089 - DNA, 201 bp, Homo sapiens
gggtgatcttctttacgcagtctactgattcagattttgtctccctccagaacaccctcacggacacacccagaataatgtttgactaactattggggcascccatggcccagtcatttggacacataaaattaaacattacacagggctatccccccccatagagacatttgacgatgtggagatgtttttggttgtcac

SEQ ID NO: 21090 - DNA, 201 bp, Homo sapiens
tgcacaccctggggaaagtccccgggtcacgcggttgtttgtggggagcctgtgacgctcaggcttgtccctatgcttccgcctacagagtcacaactgckaactgtggcggcggcactcagagcgcgggccgacccccgcccggccactgaggcgggcgggcgggagggcgcgcacgtacgcacgcacgcacgcacgcac

SEQ ID NO: 21091 - DNA, 201 bp, Homo sapiens
tgcactctccaccatgccaggaccgcagtgccagtttaccccactcacctgtagagaatgtatccggcggaggtcattatatatacttggcttgattcagkttatggagaagtcaggcatggccactgtgtgggtttgatggtatttctaggtgaggtaggccgcctatggtgtatttttggaactaaaagcctacacccc

SEQ ID NO: 21092 - DNA, 201 bp, Homo sapiens
cgagattgcgccattgcactccagcctgggcgacagagtgagactccgtctcaaaaaaaaaaaggcagggtgtggtggctcacacctgtaatcccagcacyttgggaggccaaggcgggcggattatgaagttaggagatcgagaccatcctggacaacatggtgaaaccctgtctctagtaaaacacaaaaaattagctg

SEQ ID NO: 21093 - DNA, 201 bp, Homo sapiens
agaatgcccattatctaatccaagttctactgaaatcactttctctccagaagttatgctattgctcacatttgattcacagacctcatcaccatctttcygtgagatgccttcacttagatcctgggttgacttagcctttgttgcctgatcattcaatggggtctgtgtttgtatatccaaaatttcagcttcttcctg

SEQ ID NO: 21094 - DNA, 201 bp, Homo sapiens
ctcatgcctgtaatcccagcactttgggaggccaaggcccaggagtccgagaccagcctgggcaatatagtgagacctcatctctgccaaaaattttggcyaggggcagtggctcacgcctgtaatcccagcactttgggaggtcgaggtgggcggatcaccagaggtcaggagttcaagatcagcctggctaacatggcg

SEQ ID NO: 21095 - DNA, 201 bp, Homo sapiens
catatagatttgtggcacttaaattattaatttttgatttcttaagagtgaagtctgtaaatgatttctctctgctgtacttctgtgtttgtatggttggwcattttgaaaactggtgagattgcacagtcccaaacctggatgtcttaaatacaaggaattacaaactgtgatttttgtcttgaagacctggaagaattc

SEQ ID NO: 21096 - DNA, 201 bp, Homo sapiens
cgcaccaccacacccagctaatttttgtatttttagtagagatggggtttcatcatgttggcaaggctggtttcgaactcctgaccttgtgatctgcctayctcagcctcccaaagtgctgggattacaggtatgggccactgggcccagcctatttttatttctttgatgtaggtgatctaaatagtagatgaggacagg

SEQ ID NO: 21097 - DNA, 201 bp, Homo sapiens
cattattgggaataaaactttgtcaatttcagctttattgaaagttctcccaaatatattgtttttgtttacacaaaggaaaaggaacaaaaacaataaakaaatacctttgtttttttttcttttttgagacggagtctcgctctgttgcccaggctggagtgcagtggtgcgatctcggctcactgcaacctccgcctc

SEQ ID NO: 21098 - DNA, 201 bp, Homo sapiens
tactgtaatttaatcatcactgtttctttttagccttcagtaaggaggatactagttctttggcattattgggaataaaactttgtcaatttcagctttaytgaaagttctcccaaatatattgtttttgtttacacaaaggaaaaggaacaaaaacaataaataaatacctttgtttttttttcttttttgagacggagt

SEQ ID NO: 21099 - DNA, 201 bp, Homo sapiens
ttttcttagaaagatcagcatcctcagcatttattgcaggttgcatttcaccctccaatggcttttgctgctttgaagactctgaccttttcctgcgtgtkacaagacgtttgagtgaggcccaggccccccgtgtgggctctggctgatcagaagctcctgcttcttgtggacacttccttgccacatcagcagcttcag

SEQ ID NO: 21100 - DNA, 201 bp, Homo sapiens
tgggaattttatgcagggaatcttaagtctagattttgcctttttcttagaaagatcagcatcctcagcatttattgcaggttgcatttcaccctccaatrgcttttgctgctttgaagactctgaccttttcctgcgtgttacaagacgtttgagtgaggcccaggccccccgtgtgggctctggctgatcagaagctcc

SEQ ID NO: 21101 - DNA, 201 bp, Homo sapiens
ttccttgatcgtttcaatttcttcaaggattagagttcccgtttgaatagcagaatgcccattatctaatccaagttctactgaaatcactttctctccaraagttatgctattgctcacatttgattcacagacctcatcaccatctttccgtgagatgccttcacttagatcctgggttgacttagcctttgttgcctg

SEQ ID NO: 21102 - DNA, 201 bp, Homo sapiens
cagatctcaacaacccaaaaaacagttgtcaaacaaggactggaggtcaaagaagctccttccagtaacagtggaaacagagctgctgtccagggtgaccwcccccagttgcagttgtctcttgctattggtctggatgatggcactgcagaccagcagagggcctgtcctgccacccaggccctggaggagcaccagaag

SEQ ID NO: 21103 - DNA, 201 bp, Homo sapiens
aggccctggaggagcaccagaagcccccagtttccatcaagcaggagagatgtgacccagaatctgtgatctcccagagccacccctcaccctcatcagargtgacaggccccacttttactgaaaacagtgtcaaaatacacttatgccattactgtggggaacgttttgattcccgtagtaacctaaggcaacatctcc

SEQ ID NO: 21104 - DNA, 201 bp, Homo sapiens
ttgtgtgttacttcccccagtggaaaggaaaagggcccataggagctgaatctgactttgggaccctcagtgggtgaggtggtgagcccgcagtgacgtaygcaatgcctgtcacagtgcaggctaaaaccacaggctataaccaatagcagtaactgaaaaacaaaataaagctaaaagcagtgctgtacaatcagctcc

SEQ ID NO: 21105 - DNA, 201 bp, Homo sapiens
cttttggcaccctgcaccctgggtcacagcaataacccattcatttccacatgggccaggtggagaaatgctgattcaaggtgtggtgctttctaggacaygtgatgagaaataactcaggttacctcctgtatgtaagccttgggaagaggcagtccagcagtgacctggaaggaaaagaaacagagtcagaggcatttc

SEQ ID NO: 21106 - DNA, 201 bp, Homo sapiens
ggcaggtgaatcacaaggtcaggtgtttgacaccagtctggccaacatggtgaaaccccgtctttcctaaaaagagaaaaaaattagccgggcatagtggygggcgcctgtaatctcagcggcaggctgaggcaagagaatagcttgaacctgggatgtggaggttgcagtgagccgagatcactccactgcactccggcc

SEQ ID NO: 21107 - DNA, 201 bp, Homo sapiens
agagatgcagtgaatagtggtgtgggactgacccccagtttttgttattgttgttttcatttattctgcaggcttttttttttttttttttttttttttttgagacagtcgtgctgtgtcgccaggctggagtgcagtggtgcaatctcagctcactgcaacctccgcctctcgaattcaagtgattctcctgcctcagcc

SEQ ID NO: 21108 - DNA, 201 bp, Homo sapiens
atttcagtgtctgtaataataatagcaattggctccattcttttgctttcttctgatttggatttctcttcagtgatcccattttctttaaaatctgattyttggctcaattcagtatcttttggcttagtttcttcagctacaatctctgtactttcatagtcttttccatttggtgcactttctagggtactgttactg

SEQ ID NO: 21109 - DNA, 201 bp, Homo sapiens
cagagatgcagtgaatagtggtgtgggactgacccccagtttttgttattgttgttttcatttattctgcaggcttttttttttttttttttttttttttttgagacagtcgtgctgtgtcgccaggctggagtgcagtggtgcaatctcagctcactgcaacctccgcctctcgaattcaagtgattctcctgcctcagc

SEQ ID NO: 21110 - DNA, 201 bp, Homo sapiens
ccagagatgcagtgaatagtggtgtgggactgacccccagtttttgttattgttgttttcatttattctgcaggcttttttttttttttttttttttttttttgagacagtcgtgctgtgtcgccaggctggagtgcagtggtgcaatctcagctcactgcaacctccgcctctcgaattcaagtgattctcctgcctcag

SEQ ID NO: 21111 - DNA, 201 bp, Homo sapiens
aagcgattctcctgccttagcctcccaagtagcttgggattacaggcatgcaccaccatacccagctaattttgtgtttttagcagagacagggtttcacyatcttggtcaggctggtctggaactcctgacctcaggtcatgcaccagcctcggcctcccatagtgctgggattacaggtgtgagccaccgtgccaggcc

SEQ ID NO: 21112 - DNA, 201 bp, Homo sapiens
ttttaaatcagcccaatgcaaaacactcccctttcctctacctggcaattcttaccaacctgagtaatgtgaacagagaacatgagtccatgaatcaccayaggccatccccaggcagagtgaggcacacacagctgtgatcaaatgttgccttctctcgttttaaacaaggaattaactgtacatggtgattatctctgg

SEQ ID NO: 21113 - DNA, 201 bp, Homo sapiens
ggaggcggaggttgcagtaagccgagatggagccgttgcactccagcctggtcaacaagagcaaaactccgtctcaaataataataataataataataatwtaacttggggattattccacatcagtacattaaatatgtagttttaatagagtctgccttttttttttttttttttttttgagatagggtcttgctctgt

SEQ ID NO: 21114 - DNA, 201 bp, Homo sapiens
cttggtgaagtgcatccccttaatgaaaacagcgaggcccttgaatgccgcaggctcagctccttcattgttaaggagaatgaacagcagccagaccacascaaccggggtaccacagagcctttgcagatcagtcaagtatctttgatctccaaagacacagagccagtagaattaaactgtaatttttctttttcaagg

SEQ ID NO: 21115 - DNA, 201 bp, Homo sapiens
atcactaaacatttctacttagatacctggtagacacttggagctcagagtgtctgaagtgaaacccctattcttcttcttcttttttttttttttgaggkggggtctcagaacctcttatcaagacggtttctgtacttcttctctaatgttctgggactctgcctttatatcaacacctagcacatggcagttactctg

SEQ ID NO: 21116 - DNA, 201 bp, Homo sapiens
ctctaatactttttttttgagatggagtctcgctctgtagcccaggctggaatgcagtggtgtgatctcggctcactgcaacctcttcctcccaggtcccrgttcaaacagttctcctgcctcagcctcccgagtagctgggattacaggcacacgccactgtgcccagcttttttttttgtatttttagtagagacgggg

SEQ ID NO: 21117 - DNA, 201 bp, Homo sapiens
tctgcctcctgggttcaagcgattctcccgcctcagcctcccgagtagccgggattataggtatgtgccaccacacctggctaattttgtatttttagtaragacggggtttcttcatgttggtcaggctggtctcgaactcccgacctcaggtaatccacctgcctcggcctcccaaagtgctgggagcgagccaccatg

SEQ ID NO: 21118 - DNA, 201 bp, Homo sapiens
attcttctgcctcagcctcccaagtagctgggattacagacgtctgccaccacgcccaactaatttttgtatttttagtagagacggtttcaccatattggccaggctggtcttgaactctgacctcaggtgatccaccctcctcggcctcctaaagtgctgggattataggcatttatttaccgttctgctttccctttg

SEQ ID NO: 21119 - DNA, 201 bp, Homo sapiens
gaaatggatatatacagatctgttgaggcagaaagaaaagcgggggaaaaacccactctccctgtttctacacttttgcacttagtaacaatttgcctgaytgaaggatttgtgaatggttctctttttttttttttttttttttgagaaggagtctcgctctgttgcccagactggagtgcagtggtgcaatcttggctc

SEQ ID NO: 21120 - DNA, 201 bp, Homo sapiens
tttaacagtgaatgcataaaaatacaaccaactgacatccaacctgacatattcagctatttgttgcacattatgtacacggggaaagggccaaaacagaytgtggatcatagtcgtttggaggaagggattcgatttcttcacgccgactacctttctcacattgcaactgaaatgaatcaagtgttctcaccagagact

SEQ ID NO: 21121 - DNA, 201 bp, Homo sapiens
cctcatcagaggtgacaggccccacttttactgaaaacagtgtcaaaatacacttatgccattactgtggggaacgttttgattcccgtagtaacctaagrcaacatctccatacacatgtgtctggatccctgccattcggtgtccctgcttccattctggaaagtaatgaccttggtgaagtgcatccccttaatgaaa

SEQ ID NO: 21122 - DNA, 201 bp, Homo sapiens
gtttgtgagccttagaatttaaccacttacaaaactcttgagctccctccacttctgaggacgtttcctgacacattcaacagcatcagcgtccaatcagsagggagctcaaagagtaatccagctaattctaaggacacaaaggttttctctaggtaaacagtttaggtaaattacaaagtggtaagtttttcttgagga

SEQ ID NO: 21123 - DNA, 201 bp, Homo sapiens
ttaaattctaagcttcacaggcatttgaatacatctaaaaaatttggtttgtgagccttagaatttaaccacttacaaaactcttgagctccctccacttstgaggacgtttcctgacacattcaacagcatcagcgtccaatcaggagggagctcaaagagtaatccagctaattctaaggacacaaaggttttctctag

SEQ ID NO: 21124 - DNA, 201 bp, Homo sapiens
gctcacacaagaaaatgtggatactatcctagttgagtagcagcttctctttcagaatttttataccaattctgaaaaagaaaatttgcgtggcatttttwattcataaattattttcctcctcaagtttcattgactttttttcttcacagcttatccatggttttaaggttgtatatattagatcttctcataagacat

SEQ ID NO: 21125 - DNA, 201 bp, Homo sapiens
actgagtatcctatgatttaactcaattctgacactaactgtctggagcagatcctacaggtaaagggctcagtcctaaaagactgccccacttcagacaygaatcgcaagtccaggttgtcacctgtgcttctgaccaactggttataaactggagggtccccacaaccccctgctcaggttcatttgctagaatggctc

SEQ ID NO: 21126 - DNA, 201 bp, Homo sapiens
agtaattagttaatgtatatatgaatgattcattatctttttttttttttacatggtagctgctgccttgagatctatttttttttttgagatgaagtctkgctgtgtccaatcttggctcactgcaacctctgcctcctgcatacaagcaattctctcatatcagcctcctgagtacctgggattacaggtgcccgccat

SEQ ID NO: 21127 - DNA, 201 bp, Homo sapiens
gatgatcatttataattcttcctggcacataataagtattcgatatatgttgtattaataatcagtaattagttaatgtatatatgaatgattcattatctttttttttttttacatggtagctgctgccttgagatctatttttttttttgagatgaagtcttgctgtgtccaatcttggctcactgcaacctctgcctc

SEQ ID NO: 21128 - DNA, 201 bp, Homo sapiens
gctcatagcttttcccactataccatagtcttatcatacgctaagtgaaatctaatacatttttcctttctcttcaatctcgtgcttctctctaacagccrtctctctgccctggtcctagagttacttgaaacgtaatttggctcctgagtcctgagaatattctgcattccacttgacctctgcctgttctacccttgc

SEQ ID NO: 21129 - DNA, 201 bp, Homo sapiens
ggctggagagcaatgatgcgatctcgactccctgcaacctccgcctcccaggttcaagcaattctcctgcctcagcctcccgagtagctgggattacaggygcccaccgcctcacctggctaatttttatatttttaatagagacgcggtttcaccacgttggccaggctggtcttgaactcctgacctgaggtgatttac

SEQ ID NO: 21130 - DNA, 201 bp, Homo sapiens
ggtcacacacggacggtaacaatttgtccctttccaaggaaattagttcagaggcactagatcttgctgcttctctcctcctccatcctctctcatacgaytgatactgccaggtgttgttctgccttctcccttttaaaatggaagtgagtaggtgtgtggcattgagcactcctgacagcttttgcaataaatcccatg

SEQ ID NO: 21131 - DNA, 201 bp, Homo sapiens
ctccttctttgctagtaaaatcttcccttccctcactaggcatatttgtggcatcccaggttataatcctcgttgctcattcctgaataaactcaacctayttggagataattttttgtaatgtctttctttaggctgacagtaggaaataacccccagctttcagtttttccttctgaatttaagatggtttgcatttcc

SEQ ID NO: 21132 - DNA, 201 bp, Homo sapiens
aattggttttggacagtcagagcagagtggttataaagcacacttgcaaggcgcggtggctcacacctgtaatcccagcactttgggaggccaaggtgggyagatcacaaggtcaggagatcgagaccatcctggctaacatggtgaaaccccgtctctactaaaaatacaaaaaattagccgggcatggtggcgggcgcc

SEQ ID NO: 21133 - DNA, 201 bp, Homo sapiens
gtgctgggattacaggctcagccacaggctgagcttcacgcctagctgaagctctccttctttgctagtaaaatcttcccttccctcactaggcatatttrtggcatcccaggttataatcctcgttgctcattcctgaataaactcaacctacttggagataattttttgtaatgtctttctttaggctgacagtaggaa

SEQ ID NO: 21134 - DNA, 201 bp, Homo sapiens
taggatgccaaagccccatgaaccccattgaacagttttgaaagtattgaaccatctgaattagtgttggtgtcttgggtgctgaggatgcaggtagcaargcagtggggctcctctcattttaaagcccctttcttttctttaaggctctctttaatcgtttggtgccatcagtaaatggagtgagaaggttctctgaca

SEQ ID NO: 21135 - DNA, 201 bp, Homo sapiens
attggttttggacagtcagagcagagtggttataaagcacacttgcaaggcgcggtggctcacacctgtaatcccagcactttgggaggccaaggtgggcrgatcacaaggtcaggagatcgagaccatcctggctaacatggtgaaaccccgtctctactaaaaatacaaaaaattagccgggcatggtggcgggcgcct

SEQ ID NO: 21136 - DNA, 201 bp, Homo sapiens
agatatttgacctgggtttttttctaggctgagaggataaatctagccttttaatcatgtccaaaactgtactcggcatcctcatccccaagttacccctwactcccgtcttttggttagtatcaccattcttccttcccgcaagtctgaagccttttagtttccctcccaagcattccctatattggaccagtctctaaa

SEQ ID NO: 21137 - DNA, 201 bp, Homo sapiens
atgccaaagccccatgaaccccattgaacagttttgaaagtattgaaccatctgaattagtgttggtgtcttgggtgctgaggatgcaggtagcaaagcartggggctcctctcattttaaagcccctttcttttctttaaggctctctttaatcgtttggtgccatcagtaaatggagtgagaaggttctctgacatcca

SEQ ID NO: 21138 - DNA, 201 bp, Homo sapiens
cattagcgaaggggcattctgataaccatgcaaatgacctgaagttacaaatcctgtgtggaacaggttgggggagcacctgagaaaaactagaaaaagcyagaaaagacaaggatatcaaagggtcatagtataaaacaaaagctcttgcattatttgagaaagttaaggtccaagtagaagcaaactgtagtttgatgc

SEQ ID NO: 21139 - DNA, 201 bp, Homo sapiens
caagctcatcagagaagttttcaagtattgagaagctgtcaagctcacaggggtggataaaaaattttaattttcacccaaaaactcacattttatcattrgcaacaaatacaattaattgtttcccttgaaataccagtttcactttattcatttttgagaaaatatttgtcaaatactcaagcctgaataatcattgct

SEQ ID NO: 21140 - DNA, 201 bp, Homo sapiens
ttttttcttccacattttttatattgtatggaatctggaatctgatcattgattaggacataaaagtcttcttggagtagcctattttagatgaagttacrtcagtaatcatagtcttaaagtcatgatatacatagcaaagatggatggtagaggttatttctcatttatctatagattagaagtggctagtgtggaata

SEQ ID NO: 21141 - DNA, 201 bp, Homo sapiens
cagctcacggtgtcctggtttccacagggcactccagtgtttgtccatgctggcccgtttgccaacatcgcacatggcaattcctccatcattgcagaccrgatcgcactcaagcttgttggcccagaagggtttgtaggttagtgttttttgcaaaaccagtgaatagactgtatgtttcttttaacatcaggggaattg

SEQ ID NO: 21142 - DNA, 201 bp, Homo sapiens
tgtttttgtgcacttattctaatttctccacgtggcatgcgaaggagggcagcttctatcctccaactctgatgcaggctggcttttctttcaggggtgcygattgccggaaggcatgctgtggtggttgggcgcagtaaaatagttggggccccgatgcatgacttgcttctgtggaacaatgccacagtgaccacctgc

SEQ ID NO: 21143 - DNA, 201 bp, Homo sapiens
cctctgcccccacgtggtggtgcttgttgccactgtcagggctctcaagatgcacgggggcggccccacggtgagtggtgggttgaagtatctgattatcrgcagtgtgctgacggccaaaaggaagttggatgacttctgcctgtttcttcattgagttgctcttatcctcgtgattaacaggcagcaaaagcaagggac

SEQ ID NO: 21144 - DNA, 201 bp, Homo sapiens
tcttccacattttttatattgtatggaatctggaatctgatcattgattaggacataaaagtcttcttggagtagcctattttagatgaagttacatcagyaatcatagtcttaaagtcatgatatacatagcaaagatggatggtagaggttatttctcatttatctatagattagaagtggctagtgtggaataaatag

SEQ ID NO: 21145 - DNA, 201 bp, Homo sapiens
tgcaatggaagagggcagagcttcttaatcactatccactgcccatggtggggcccatgaaatggacaccttcacccatttgctcatttctgtggatgcarcagggctgagccacggcatagatcaagactgggggctggggggcggggcggggaggcaccagacacctccatcctttagatatactctacaaaagagaaa

SEQ ID NO: 21146 - DNA, 201 bp, Homo sapiens
tgagtaggtatatatttgttcatggttttgtcatttaaactcagatttcaattgagagactagtattagaaaacacttgatcaaaactgtccaaatgattstaaaaaataaataaataaatgtgcttagtagttacaataatgcatttgcatttatttgatttctaagtcattggagaagcatgcttaactgagcttccac

SEQ ID NO: 21147 - DNA, 201 bp, Homo sapiens
tcgagtgatcctcctgcatcaaccttctgagtagctgggactacaggcatgtgccaccatgcctggctaatttttaagctttttgtagcgacaggggtctyactgtgttgcccaggctggactcaaactcctggactcaagcgatcctcctggttcaccttcctaaagtgctgagattacaggcgtgacccaacatgcctg

SEQ ID NO: 21148 - DNA, 201 bp, Homo sapiens
tttggcatgtgtagaaatgagcacggcatgtgaagggctgtcagaaacagtgtgtggcttacatttgaggccttaacccaatatcttatgaaatagcttaygacacttaagaatttaatacaaagctcagggatatccttttcatttctgggtttttttttggtgtgtatttcattatttcatttctgatgtccaaatccc

SEQ ID NO: 21149 - DNA, 201 bp, Homo sapiens
ctgtgcttctgaccaactggttataaactggagggtccccacaaccccctgctcaggttcatttgctagaatggctcacagaactcagagaagcatttcayttgtgtttatggtttattataaaggatacagctcagaaacaaccagatggaagagaagcgtagggggcatcactctcccagcacctggatgtgttcacca

SEQ ID NO: 21150 - DNA, 201 bp, Homo sapiens
ttcagatgtagacgctgagctgccaggaacattagtcactgtcaagccttcaccgtttttaacctccctcccactctccctaccgtgcttttaagacagtrgctcataattgatcactcattttcttgtagtgtaattatctaacaggcgataaagaaattgctctcctacaactcctcactttgaatacttgcgatatga

SEQ ID NO: 21151 - DNA, 201 bp, Homo sapiens
tcaatctcgtgcttctctctaacagccatctctctgccctggtcctagagttacttgaaacgtaatttggctcctgagtcctgagaatattctgcattccwcttgacctctgcctgttctacccttgcgggacatctgaatgcttaattagtgggtatcgttgccagctttactcccaggaagtaacactggctgcttttt

SEQ ID NO: 21152 - DNA, 201 bp, Homo sapiens
tgagccaccacacccagccctaattttttttttttttttttgaggtggagtttcactattgttgcccaggctggagtgcaatggcacaatctcaactcacygctggagtgcagtggcactatctcagcgcactgcaacctccacctcccaggttcaagcaattctcctgcctcagcctcccgagtagctaggattacaggc

SEQ ID NO: 21153 - DNA, 201 bp, Homo sapiens
agcatagttgttctataagtgggcctttcaaaggggggcttactacatttatatgatttgtttggtttttccttcccttagtttgctataattaagcctgytctctccattggtggcatttttcttgattaagtctcctttctaaagagactggttgtgaagaggcagatggtttgagtaggtgctgcgagtgtttgctgg

SEQ ID NO: 21154 - DNA, 201 bp, Homo sapiens
tatttacggcagccatataacgaatacctcttctgtgccagccactatgttgttaggctctgtcttctgatggaagggtctgtgctgtgcagagtagagtyaatttgtattatcataaccctatgaatacataaaatctataaacacaattggtaaatataatttgggtaagggtaactaattcctttcaaacagcaaata

SEQ ID NO: 21155 - DNA, 201 bp, Homo sapiens
ttttttttttttgaggtggagtttcactattgttgcccaggctggagtgcaatggcacaatctcaactcaccgctggagtgcagtggcactatctcagcgsactgcaacctccacctcccaggttcaagcaattctcctgcctcagcctcccgagtagctaggattacaggcatgtgccaccacacctggctaattttgta

SEQ ID NO: 21156 - DNA, 201 bp, Homo sapiens
ctctccattggtggcatttttcttgattaagtctcctttctaaagagactggttgtgaagaggcagatggtttgagtaggtgctgcgagtgtttgctggcsaagtgcagggcaagttgggtatatttgtaagctcgctgtggatggtagctccagagcctaagcacggtgctgcctcctctgtgcatcactgggtcatgca

SEQ ID NO: 21157 - DNA, 201 bp, Homo sapiens
ccagagcagtatacaagccccgtttgttttggctatattgcacaccctacaccctccagaagagttgttaaaatgtgaggctcagaagcttccatgttggyattttaccagctaaggcatgaccaagatggtgacattatttctttttcttgccacctctctcagtatctctccttattagctatcatcaaatctctttgt

SEQ ID NO: 21158 - DNA, 201 bp, Homo sapiens
tcctgtagattaaatacatgtaggcccttttgtgcttaaaaagatttgtctgggcagggcgtggtggctcatgcctgtaatcctaggactttgggaggccsaggcaggaggatcacctgagatcaggagttggagaccagcctgactaacatggtgaaaccccatctctactaaaaatacaaaattagctgggcatggtgg

SEQ ID NO: 21159 - DNA, 201 bp, Homo sapiens
ctacttactttgctggctaagctttttttttttctttgcccctcaccacaagcctggacgggagacgtactgcttggtatctggtgcttgagaggtcccaggagataagggagcatttctgtgaaaggttttgccagagcctgtcaggaacttaatcttgactgcaatgaatgacttaacattataagtgatctttgggtt

SEQ ID NO: 21160 - DNA, 201 bp, Homo sapiens
gtgtgtctgattgctatataagacactgcttttggtatgaaattatgacagtctttatggaaaataatttggcatattatcaagtgccttaaaaatgcttctcctccttgactcatttagagtatgaactgggtttttttgttcattttgtgtgtgtgtgtgtttttactttgaaattattttaattttgaaatagaaaac

SEQ ID NO: 21161 - DNA, 201 bp, Homo sapiens
tgtgtctgattgctatataagacactgcttttggtatgaaattatgacagtctttatggaaaataatttggcatattatcaagtgccttaaaaatgcttctcctccttgactcatttagagtatgaactgggtttttttgttcattttgtgtgtgtgtgtgtttttactttgaaattattttaattttgaaatagaaaaca

SEQ ID NO: 21162 - DNA, 201 bp, Homo sapiens
ttgtactttagcaccagagtcaacagctttctgtgatacaaggtttatataatatgttgtaatcacatctccctgcctcagacctctagtctttttcgctstggtgctggcaccaccatcttcccacattccctgagctagaagcctgaggccgtctccttaggagctctcttcctcactccctgcatccagttaggggct

SEQ ID NO: 21163 - DNA, 201 bp, Homo sapiens
gtgtctgattgctatataagacactgcttttggtatgaaattatgacagtctttatggaaaataatttggcatattatcaagtgccttaaaaatgcttctcctccttgactcatttagagtatgaactgggtttttttgttcattttgtgtgtgtgtgtgtttttactttgaaattattttaattttgaaatagaaaacat

SEQ ID NO: 21164 - DNA, 201 bp, Homo sapiens
ccagtgacttctaaatctagatttcttctgagctccaggctcttggtctgggacaccactggtttccttcccaccttcaagtctcctttgcttgttgttgytcatcaccctaatacctaaaccatttgaatgccttgggctcacccttgagatctcttccccatcttattctttccctaagtaacctcacccagtcccata

SEQ ID NO: 21165 - DNA, 201 bp, Homo sapiens
cgaggcgggcggatcacttgaggtcaggagttcgagatcagcccggccaaaccccatctctactaaaaaaatacaaaaactagctgggcatggtggcacgygcctgtaatcccagctacttgggaggctgaggcgcgaaaattgcctgaacccaggaggtggatgttgcattgagccaagattgtgccactgcactccagc

SEQ ID NO: 21166 - DNA, 201 bp, Homo sapiens
actgcactccagcctgggcaacagaccgagactctgtctccaaaaaaaaaaaaaaaaaaaaaaaatgacaactcagggtcttggaataattaattaatatatttttttgctattagaggattattttcattaagtattttgggtagtattctgttattctatccttttaagctatttgtttaagcctcagatgtaaaagag

SEQ ID NO: 21167 - DNA, 201 bp, Homo sapiens
ttgggaggctgaggcgggtggatcacaaggtcaggagattgagaccatcctggctaacacaatgaaaccctgtctctactaaaaatacaaaaaaattagcygggcatagtggcgggtgcctgtagtcccagctactcgggaggctgaggcaggagaatggcgtgaacctgggaggtggagcttgcagtgagccgagattgc

SEQ ID NO: 21168 - DNA, 201 bp, Homo sapiens
caaagaaagagaacccgggcacaacctgcgtttgcaagtggactgcctagtggctgtagccgctggctcctgtgcttcggggaaaagtcctgtgccgactrtgctcccaaacgcgcagctgctggtgactttctgccgggagagtgggtagttgcggcttcctggagcccccctagtcagaactcagaaatccaatctact

SEQ ID NO: 21169 - DNA, 201 bp, Homo sapiens
gttatttctcatcacgtgtcctagaaagcaccacaccttgaatcagcatttctccacctggcccatgtggaaatgaatgggttattgctgtgacccagggygcagggtgccaaaaggcctgcagtgtgctgaggagttatattaaatgagtagatagggaagatgcacctcacaaaatagaattgtcccacatagggtgtc

SEQ ID NO: 21170 - DNA, 201 bp, Homo sapiens
cggttagttaagggactcgggtccttccgaactgcgcatgcgccaccgcgtctgcagggggagaagcgggcaggggcgcaggcgcagtagtgtgatccccyggccagtccctaagcacgtgggttgggttgtcctgcttggctgcggagggagtggaacctcgatattggtggtgtccatcgtgggcagcggactaataaa

SEQ ID NO: 21171 - DNA, 201 bp, Homo sapiens
catgtgtagaaatgagcacggcatgtgaagggctgtcagaaacagtgtgtggcttacatttgaggccttaacccaatatcttatgaaatagcttatgacasttaagaatttaatacaaagctcagggatatccttttcatttctgggtttttttttggtgtgtatttcattatttcatttctgatgtccaaatcccctacc

SEQ ID NO: 21172 - DNA, 201 bp, Homo sapiens
tggttttgcacctttagtacatcttggacaggttccatgttaacacagatgggtctcactttcataacatctgcatgataaatatttattgagtgtatatrtcataattcattggcccagtcccccttggaggaggtttatgtttataattttccaatgctacaagcagggctgcagtaaacatacttaaagatacatttc

SEQ ID NO: 21173 - DNA, 201 bp, Homo sapiens
ctcactaggcatatttgtggcatcccaggttataatcctcgttgctcattcctgaataaactcaacctacttggagataattttttgtaatgtctttcttyaggctgacagtaggaaataacccccagctttcagtttttccttctgaatttaagatggtttgcatttcctagaggggatcccatttagaggtaggggtca

SEQ ID NO: 21174 - DNA, 201 bp, Homo sapiens
ggttttttttacagacagggtctcactctgtcacctaggctggactgcagaggcgtgatcatagctgcagcctctaactcttgggcttaagcagtctcccygcttcaacctcccaactagctggaagaacaggaacacgccaccacaccaggctaattttttaattttttgtagagacggggtctccctatgttgcccagg

SEQ ID NO: 21175 - DNA, 201 bp, Homo sapiens
cctctccaggctccaatgcatagcacccaaggctggaagcccagtccttgaaaaccagcaggagacctgaaagagcagggacatatggactttagaacccrtttctacttgcaacttttatccattctggcaaacaggaggctgccactttttgtcttactcagcgtctgctagtcttaaatcacccttcaaccaaagtgc

SEQ ID NO: 21176 - DNA, 201 bp, Homo sapiens
tctgaggcttgatattaaaagaaagtgttcctggctgggtgcagtggctcacacctgtaatcccagcactttgggaggccaaggctggcagatcacctgargttgggagttcaagaccagcctgaccaacatggagaaactccgtctctactaaaaatacagaattagccgggcttggttgcgcatgcctataatcccagc

SEQ ID NO: 21177 - DNA, 201 bp, Homo sapiens
gtctacacgaagcaggtagatgtttggttagtttgtcctttcaactctttgcaaagcaggacttggagtcacaatctctgggtcctcccagccctgccaartacccgttgcttcacttctctgggtggcagccttctctcctctgaaatactgagtttggattaggtggcacagtccctggttctttatttacccataggc

SEQ ID NO: 21178 - DNA, 201 bp, Homo sapiens
ttgtggcatcccaggttataatcctcgttgctcattcctgaataaactcaacctacttggagataattttttgtaatgtctttctttaggctgacagtagraaataacccccagctttcagtttttccttctgaatttaagatggtttgcatttcctagaggggatcccatttagaggtaggggtcaaaatttttgtctta

SEQ ID NO: 21179 - DNA, 201 bp, Homo sapiens
gctgcccaaagcagtcgattttgttctgtgctgtgtgattggtcacataccctaagtccttagggcaggaaataatcttatactactgtacagcctgcaarcattgcagcgtcttgcctttaacacatgaaaagcaccattttaagctaggagatttaaataggaaatgcctctgactctgtttcttttccttccaggtca

SEQ ID NO: 21180 - DNA, 201 bp, Homo sapiens
ggttgaggcagaatggcgtgaacctgggaggcagagcttgcagtgagccgagatcacgccactgcactccagactgggcgacagagcgagactccgtgtcaaaaaaaaaaaaaaaaaattaagcacacttaacctgggtagtcaagaccttctccacttgctcatctctttcttctcattcttcctcacacctgtgactgg

SEQ ID NO: 21181 - DNA, 201 bp, Homo sapiens
ggggtcatgcaagaacttgtgtgggttgtttaggtattgcattggtggtcagggttttgttataatggcctcaccgtagtagaatgggaagcaaaaaatcttttttttttttttgggggacgaagtctgtctctgttgcccaggctggagtgcagtggcacgatctccactcgctgcaagctctgcctcccgggttcatgc

SEQ ID NO: 21182 - DNA, 201 bp, Homo sapiens
agtgacctggagcttgaaactgaggtgaggattaaaataaccacctcttctaagtttcatttatttcattttgcttagagcacagtagagagtgccaagcrtttcctggagaaatttaagccaggaaagtggatgattcagtataacaaccttaacctcaagacacctgttccaaggtaaaaataaagttttactgattta

SEQ ID NO: 21183 - DNA, 201 bp, Homo sapiens
atttagccaagacctccaggtatttttttttttttttttttttgagacacagttttgctcatgtcacccaggctggagagcaatgatgcgatctcgactcyctgcaacctccgcctcccaggttcaagcaattctcctgcctcagcctcccgagtagctgggattacaggcgcccaccgcctcacctggctaatttttata

SEQ ID NO: 21184 - DNA, 201 bp, Homo sapiens
cctttctaacatgcaccagctgacaggggccaggcgagcagccccaaagcatgttaggtgcctcttgactcttagctaggattgaagcatggtaataagtrggtctgaagcagttcattttgtgattgaactggagtgacctggagcttgaaactgaggtgaggattaaaataaccacctcttctaagtttcatttatttc

SEQ ID NO: 21185 - DNA, 201 bp, Homo sapiens
ggctcactgtggcctcaacctcctagcctcaagcaatcctcctgccttagcatcccaagtagctggaactacaggcacatgccatcatatccagctaattktttatttcctgtagagatgggggtctcactatgttgcccagggtggtttagaactcctggcctcaagtgatcctctccacctcagcctgggattataggc

SEQ ID NO: 21186 - DNA, 201 bp, Homo sapiens
aacggagcaactactgtgtatccagcacaatgccaggccttgggctacacaactgaataaggttcaacttcaccttcaccttcagctgcttcctccccatstcctctctgtcatgtctgttattccttccaaaccttgtttgatttccccttatcaagggatgatctttccttctctccctccctcctctcccatagaaca

SEQ ID NO: 21187 - DNA, 201 bp, Homo sapiens
gccatcatatccagctaattttttatttcctgtagagatgggggtctcactatgttgcccagggtggtttagaactcctggcctcaagtgatcctctccayctcagcctgggattataggcgtgagccactgtgcccagcattagtttatttgtaatgcttttttacatcctagatgagcacaatgcctggactccccacc

SEQ ID NO: 21188 - DNA, 201 bp, Homo sapiens
aaaattaataatgtatatttcttcatcaagggtggtcctagtgaaactggcatttagttttactgggagtgtgtggtagtgaaggataccttgactactartccaaagccattgtcttgatttgtgctggttcactagtagtcttacacaccattgcttttgcaccatcggtacagacgttaacacaatgaaaaaggcaaa

SEQ ID NO: 21189 - DNA, 201 bp, Homo sapiens
tattgaggatggtatctaggtcatcaaaagaagcctgagagagaagcttgtctcattttatgcttgtagtactaaggtttaggagactgactagcccaagrgtgcacagagttagtagatagaagagttgccacttgcaggcaggtctgcctggtgccagagcctttgattttcatcatgtgctgtacagcttccaagatg

SEQ ID NO: 21190 - DNA, 201 bp, Homo sapiens
taacatcaccaacaagctcatcagagaagttttcaagtattgagaagctgtcaagctcacaggggtggataaaaaattttaattttcacccaaaaactcayattttatcattagcaacaaatacaattaattgtttcccttgaaataccagtttcactttattcatttttgagaaaatatttgtcaaatactcaagcctga

SEQ ID NO: 21191 - DNA, 201 bp, Homo sapiens
ttgccaggctggaatgtagtagtgcaatcatagctcactgtagcgttgaactcctggcttcaagcagtcctcctgcctctgcctgccaaagcatgggtatyacaggcgtgagccactgtacctggccccgtttacactcttaaagatgtaagacctcaagaagctattgtttatacagatttatccattaatgtttactat

SEQ ID NO: 21192 - DNA, 201 bp, Homo sapiens
aggactggtgccgagcatcctgcagtgcacaggatagtccccataacaaaggatgatctggtccaaatgtcagtggtgctgagatcgaaaaaccctgatcragaagcttaatgtgagttattgtgtcattgtgtgtgtggattaatgatggactttaccctcactaagaattataggattcattaaaattttacactattc

SEQ ID NO: 21193 - DNA, 201 bp, Homo sapiens
ttacttcccgaagctcaacacaaagctgaagtctacacgaagcaggtagatgtttggttagtttgtcctttcaactctttgcaaagcaggacttggagtcrcaatctctgggtcctcccagccctgccaagtacccgttgcttcacttctctgggtggcagccttctctcctctgaaatactgagtttggattaggtggca

SEQ ID NO: 21194 - DNA, 201 bp, Homo sapiens
acgatctccactcgctgcaagctctgcctcccgggttcatgccattctcctgcctcagcctccctagtagctgggactacaggtgcctgccaccatgcccrgctaattttttgtatttttagtagagacggggtttcaccgtgttagccaggatggtctcgatctcctgacctcgtgattctcccacctcggcctcccaaa

SEQ ID NO: 21195 - DNA, 201 bp, Homo sapiens
gacggatacagagtctgagctggacctcatcagccgcctttccagagaacatggggcttttgatgccgtgaagtgcactcactgggcagaagggggcaagkgtgccttagccctggctcaggccgtccagagagcagcacaagcacccagcagcttccagctcctttatgacctcaaggtgggtgatttgctgtctgcaaa

SEQ ID NO: 21196 - DNA, 201 bp, Homo sapiens
ctgggttcaagtgattctcctgcctcagcttcccaagtagctgggattacaggcgtctgccaccgtgcccagctaatttttcttatttttttagtagagayggggtttcaccatcttggccaggctggtctcgaactcctgacctcgtgatccacctgccttggcctcccaaagtgctggaattacaggcgtgagccactg

SEQ ID NO: 21197 - DNA, 201 bp, Homo sapiens
agcaccaacacacagcgatttcagaattcatttatgtaactgcagaaattggaacattacatagacatagagtcggtgctgctcccgtgcactcctcctcrctgttttgaggtgtgtcctcagtaacccagtgtggctgttgatcccagtggtgtggtatttgtggtctctggacatctcattttggaaaaactgcaagtt

SEQ ID NO: 21198 - DNA, 201 bp, Homo sapiens
tgcccagcattagtttatttgtaatgcttttttacatcctagatgagcacaatgcctggactccccacccggccctgtttttatgatattgatttggaccytgaaacagaacaggtgaatggattattctaaacaggtaagttgttactgggtaataatttggcttttttcctcatgtagcttatttatgaattatagggc

SEQ ID NO: 21199 - DNA, 201 bp, Homo sapiens
gtgcagtatggaaggaacaggaaacatttcagtgcttagagaaaacatttatttcttgtttttccttccagatcaccatccatcttcaagaagctactttraaagtctggccagtgtctattcaggcccactgggagttaggaagtataagtaagccaagagaagtcagcccctgcccagaagatctgaaactaatagtag

SEQ ID NO: 21200 - DNA, 201 bp, Homo sapiens; identical to SEQ ID NO: 5528

SEQ ID NO: 21201 - DNA, 201 bp, Homo sapiens
ccaagttaaaggatactaactcctaccatcgtgttgctgaagcaaaaatcacatgggcagctcagctagcaagactgaacgaaacaaaatttaaaagcagrcaagccctgtacctccttttggtcttgcaaagcgtgagctgaggaggcgagtgagcaactcctctactccccagcactcattcttgtaaggtgaaggtgg

SEQ ID NO: 21202 - DNA, 201 bp, Homo sapiens
aacctatgatacttatggggtcttcaactcatttcaacaccaggaatgtcattctcacaaacctctgtagtcatgcttttgatgaaggctgtcattggatytccccagctcctgctgtcactgttggccactgcacagggattctctgggatgggtgatatgtagctggaggtgcttttatttgaccctcatagtccactg

SEQ ID NO: 21203 - DNA, 201 bp, Homo sapiens; identical to SEQ ID NO: 5530

SEQ ID NO: 21204 - DNA, 201 bp, Homo sapiens
caaacatctgtcattccatagcttttaagttaagtaggcactggagcctgatgggactaacacaccctacaattctgctgagtttttgtcgtaactgatcwccaggactgtgattctgagacttagttttgatttctcccccacttgaccagatgataaaaaaccaaatgggagaaaagttgtgggtgatgtggcatacga

SEQ ID NO: 21205 - DNA, 201 bp, Homo sapiens
gtagagttaatttgtattatcataaccctatgaatacataaaatctataaacacaattggtaaatataatttgggtaagggtaactaattcctttcaaacrgcaaataagctataatgatgtggcataatgacaggaaacataccagctctttttttcttgaaggctgggaaacaagcagagctctactctagtgtcatag

SEQ ID NO: 21206 - DNA, 201 bp, Homo sapiens
attgtgaataaaagtttctataagagttctgaaaagctgatcgagttttggctgcttttctccccaagtagaaatgtcaaaaacctactcagaagtaaagrtgtgaatttattgagaaaaagggaagggaagaatagagaaataagatcaggcacattaatagaggaaagtagggatggcataattccagtctgttttgga

SEQ ID NO: 21207 - DNA, 201 bp, Homo sapiens
ggagctgattgtacagcactgcttttagctttattttgtttttcagttactgctattggttatagcctgtggttttagcctgcactgtgacaggcattgcrtacgtcactgcgggctcaccacctcacccactgagggtcccaaagtcagattcagctcctatgggcccttttcctttccactgggggaagtaacacacaa

SEQ ID NO: 21208 - DNA, 201 bp, Homo sapiens
gaaatgcctctgactctgtttcttttccttccaggtcactgctggactgcctcttcccaaggcttacatacaggaggtaacctgagttatttctcatcacrtgtcctagaaagcaccacaccttgaatcagcatttctccacctggcccatgtggaaatgaatgggttattgctgtgacccagggtgcagggtgccaaaag

SEQ ID NO: 21209 - DNA, 201 bp, Homo sapiens
tgctgtgtgattggtcacataccctaagtccttagggcaggaaataatcttatactactgtacagcctgcaagcattgcagcgtcttgcctttaacacatraaaagcaccattttaagctaggagatttaaataggaaatgcctctgactctgtttcttttccttccaggtcactgctggactgcctcttcccaaggctta

SEQ ID NO: 21210 - DNA, 201 bp, Homo sapiens
accagatcgcactcaagcttgttggcccagaagggtttgtaggttagtgttttttgcaaaaccagtgaatagactgtatgtttcttttaacatcaggggarttgggatggcatttttactgttgctttcctctttacagtgacggaagcaggatttggagcagacattggaatggaaaagttttttaacatcaaatgccgg

SEQ ID NO: 21211 - DNA, 201 bp, Homo sapiens
agggggtgagtggtgcactgacagtgcttatgaaggacgcaatcaagcccaatctcatgcagacactggaggtgagcagagtgactcctgccttcttgaaytggttttggacagtcagagcagagtggttataaagcacacttgcaaggcgcggtggctcacacctgtaatcccagcactttgggaggccaaggtgggcag

SEQ ID NO: 21212 - DNA, 201 bp, Homo sapiens
cacaagcctggacgggagacgtactgcttggtatctggtgcttgagaggtcccaggagataagggagcatttctgtgaaaggttttgccagagcctgtcargaacttaatcttgactgcaatgaatgacttaacattataagtgatctttgggtttaggtgcccaaataccagtccctccttagtaagcagccttttagac

SEQ ID NO: 21213 - DNA, 201 bp, Homo sapiens
tgcttatgaaggacgcaatcaagcccaatctcatgcagacactggaggtgagcagagtgactcctgccttcttgaattggttttggacagtcagagcagastggttataaagcacacttgcaaggcgcggtggctcacacctgtaatcccagcactttgggaggccaaggtgggcagatcacaaggtcaggagatcgagac

SEQ ID NO: 21214 - DNA, 201 bp, Homo sapiens
agccagactccgtctcaaaaaataaataatttaataattggcaacttcatagcatatccagaaaaaaaccatgaatggtccaattcaggtgaaagtatcarttggtccaagatggctaacatgggtaagcctagaatgtcaaatattggtttcagaaggttgggtttttttgctggtgggagttgatgctgcacacatttg

SEQ ID NO: 21215 - DNA, 201 bp, Homo sapiens
ctcctgagtacctgggattacaggtgcccgccatcacgcctagctaatttttttttttgagatggagtttcactcgtcgcccagactggagtacaatggcrtgatctcggctcactgcaacctctgcctcctgggttcaagcgattctcctgcctcagcctcccaagtagctgggattacaggcgtccgccaccatgtcca

SEQ ID NO: 21216 - DNA, 201 bp, Homo sapiens
tttgccagagcctgtcaggaacttaatcttgactgcaatgaatgacttaacattataagtgatctttgggtttaggtgcccaaataccagtccctccttartaagcagccttttagacctaaccttttctacctaaggttttgttcagtctttttgaaaagcaggaaggccaggtccttgtgaggcttttctcattacaag

SEQ ID NO: 21217 - DNA, 201 bp, Homo sapiens
acccatttgttcttcccctttgttttcctaattccttagcaatgcattcaagaacattcatgatctggcccaagtatatatttaaaagttgagttttcatytttttttaataaagtggatgagtaacttcccaaataactgaatatttataggaaattaagacttgacttttcattataagagatactaatgggctaggca

SEQ ID NO: 21218 - DNA, 201 bp, Homo sapiens
atacagcataaatgtttctaaagagtaaagacatctaattgcctttatttccttcttatttccatcacttttttaagattgactagcatcaatgctgggaracttgctagaggtgacctcaatgactgtttcattccttgtacgcctaagggatgcttggaactcatcaaagagacaggtaaaaacaacaaaccaaacaac

SEQ ID NO: 21219 - DNA, 201 bp, Homo sapiens
gacaggtctatacctttctccgaagatgatttcgagttctccaaatttaaagaggaaagggtgggttattgaaaagtacacgttttcatgtaagaggtggrtagggaaaaatagtcattcatgaccttctctggctcagtgaatctgcattttttacataagatgacagatggccggacgcggtggctcacgccagtaatc

SEQ ID NO: 21220 - DNA, 201 bp, Homo sapiens
ttatcttcatgtagagatcaccctttattttagcaaagttgatggatggatttaaaatacagtataattattgcaaagtgctatgagagtccagaagaggractcattctgccaagaggagggctttacaaagaagatatttgacctgggtttttttctaggctgagaggataaatctagccttttaatcatgtccaaaac

SEQ ID NO: 21221 - DNA, 201 bp, Homo sapiens
atgcaggcaatctgcattttacataagataacatagacagaattgggcaggggaaaaatcagatatacatttgtgtctggtgggctggggggatttacatygccatggtgaaattttaacagaaacatcataaagatgttgcagctcactacgaatttctttgtgggcaaaatatgggggaggcatgtagcttttcatctt

SEQ ID NO: 21222 - DNA, 201 bp, Homo sapiens
ctaacttttttttttgagacggagtttcgctcttgttgcccaggctggagtggaatgctcactgcagcctccgcctcccgggttcaagtgagtctcctgcytcagcctctgagcagctgggattacaggtgcccgctaccaagcccagctgattttttaatatttttagtagagacggggtttcaccatgctggccaggct

SEQ ID NO: 21223 - DNA, 201 bp, Homo sapiens
tgctctcctgcctagatagctcctcaagggcagtggtcactgtggcgccacatccagcttcctgccatctgaccactggcactcatatctattgaattgtygaagggagttatagctggaagtcttttttctcccttcccatctcaagtttcagatgtagacgctgagctgccaggaacattagtcactgtcaagccttca

SEQ ID NO: 21224 - DNA, 201 bp, Homo sapiens
ctcccgcctccgcctcccgagtagctgggactacaggcgcccgccaccacgcccggctaattttttttgtatttttagtagagatggggtttcaccatgtyagccaggatggtctcgatctcctgacctcgtgatccgcccacctttgcctcccaaagtgctgggattacaggcgtgagccaccgcacccagcaagctcag

SEQ ID NO: 21225 - DNA, 201 bp, Homo sapiens
tcttagagttagctttctctgcttggtgagggtatcacattttgcttgttctagcaattactacaaatgttgacaccgggaacaccttcacccttccacctttttttttttttttggagacacagtctcgctctgttgcctgggctggagtacagtggcacgatcttggctcactgcaacctccgcctcctggtttcaagc

SEQ ID NO: 21226 - DNA, 201 bp, Homo sapiens
tctgtatatacatagggatgagatccaattctaaagcaaaatttatttgtgtttcattatataccttatacttgtagactgaaggtaattttatatatatrtgtgtgtgtgtatatatatatataataataattattattattattattttttttgagactgagttttgctcttgtcacccaggctggagtgcaatggcac

SEQ ID NO: 21227 - DNA, 201 bp, Homo sapiens
ttgtgtttcattatataccttatacttgtagactgaaggtaattttatatatatgtgtgtgtgtgtatatatatatataataataattattattattattwttttttttgagactgagttttgctcttgtcacccaggctggagtgcaatggcacgatctcggcgcactgcaacctccacctcctgggttcaagtgattct

SEQ ID NO: 21228 - DNA, 201 bp, Homo sapiens
caaaggactcttctggctcttgcaattcaaattagcaccacaaaactgagaactgtctgtataagggacaactgaagctaagattcaggccatgtcctgakatctgaggagagcgtccagtaatagcaccaatatgacaagctcagaaaatcctgtgttacaaaagccggcttctttctctgccatggtcctgttaaaagg

SEQ ID NO: 21229 - DNA, 201 bp, Homo sapiens
tataggcatgagccaccatgcccagctaattttattttatttttgaggcagagttttactcttgtcgcccaggctagagtgcagtggtgcaatattggctyactgcaacctccacctcccaggttcaagcgattctcatgcctcagcctcctgagtagctgtgactacaggcatgcgccaccacgcccagctaatttttgt

SEQ ID NO: 21230 - DNA, 201 bp, Homo sapiens
cctccacctcccaggttcaagcgattctcatgcctcagcctcctgagtagctgtgactacaggcatgcgccaccacgcccagctaatttttgtatttttarttgcccatattgcccaggctggtctcaaactactgacctcaagtgatctgcccactcaagcctcccaaagtgctgggattacaggcgtgagccaccgcac

SEQ ID NO: 21231 - DNA, 201 bp, Homo sapiens
cgcacctgtccccgctttttttttttttttttttgagacagagtcttgctctgttgcccaggctggatgcagtggcatgatctcagctcactgcagcctcygcttcctgggttcaagcgattctcatgcctcagcctcctgagaggctgagattacaggcatgcgccactatgcccggcttattttttatatttttgtaga

SEQ ID NO: 21232 - DNA, 201 bp, Homo sapiens
tgtggaaatgaatgggttattgctgtgacccagggtgcagggtgccaaaaggcctgcagtgtgctgaggagttatattaaatgagtagatagggaagatgyacctcacaaaatagaattgtcccacatagggtgtcaataagccactgccctagaccagtggttgattctcaacagctgattttgaccccggggacatttg

SEQ ID NO: 21233 - DNA, 201 bp, Homo sapiens
aggatcataaattgattgtatcttgagtgaaaagaacttgttctccattatttcaagtagcagagcatatgctaaaccgtcacagctatgcttgatgcacygctacctttctaccccaaagtcctcacgttctcacttgtctatccccacttctgcacgtcctcaccacctgcttctttgtttgattaccaataaatagtg

SEQ ID NO: 21234 - DNA, 201 bp, Homo sapiens
aggagtaaggggaaatgcctacccttatctcatctctacccccaactgaaggaaatcctctcttcctctcctagatgttccacagaacccaacaactggtmtctttccaggagatggctcaggtaggaaggagcctccccgcctggggctgttactgacattgagtctgtgtcaggtttggtcagatctggactttcagag

SEQ ID NO: 21235 - DNA, 201 bp, Homo sapiens
ttatgtactattaacttgtcttgtctcattcctttgactccgctggacttcgtggcccccacggcctagtgttggatctgatcaccccaacaagctgagtytagattttcttttcattcattcaggcagtccatatattttaaatgggacaatttaatccatttacatacacattattattaataggttattttcatttca

SEQ ID NO: 21236 - DNA, 201 bp, Homo sapiens
tttttaaaaatttttggcacttgttttgtgttctaacatatggtcgatccttgggaatgttgcacatgctgatgaaaccaatgtgtattctgcagctgtcrgttgaaatgttctgtaaatatcttaggttcatttggtatatggtgcagtttaaatccaacgtttatttgttaatcttgtctagatgatttgttcaatgct

SEQ ID NO: 21237 - DNA, 201 bp, Homo sapiens
attaataggttattttcatttcattgattgttttctgattgttttatatattcctggttccttacttcccctcttattgtttctttttgtggttggctgatgttttttttttttttgtagtgataagatttgattcctttctctttcttctttgtgtatgggctgtcagtgagttttaagttcacgtgtttttgccttttc

SEQ ID NO: 21238 - DNA, 201 bp, Homo sapiens
  misc_feature (1)...(201): n = A,T,C or G, or insertion/deletion polymorphism (see Tables 1-2)
agtaaggggaaatgcctacccttatctcatctctacccccaactgaaggaaatcctctcttcctctcctagatgttccacagaacccaacaactggtatcnttccaggagatggctcaggtaggaaggagcctccccgcctggggctgttactgacattgagtctgtgtcaggtttggtcagatctggactttcagagtca

SEQ ID NO: 21239 - DNA, 201 bp, Homo sapiens; identical to SEQ ID NO: 5551
  misc_feature (1)...(201): n = A,T,C or G, or insertion/deletion polymorphism (see Tables 1-2)

SEQ ID NO: 21240 - DNA, 201 bp, Homo sapiens
gccgctgctgctactgctgcccctgctgtgggcaggtgagtggctgtggggagaggggttgtcgggctgggccgagctgaccctcgtttccccacaggggycctggctatggatccaaatttctggctgcaagtgcaggagtcagtgacggtacaggagggtttgtgcgtcctcgtgccctgcactttcttccatcccata

SEQ ID NO: 21241 - DNA, 201 bp, Homo sapiens
cccacaggggccctggctatggatccaaatttctggctgcaagtgcaggagtcagtgacggtacaggagggtttgtgcgtcctcgtgccctgcactttctyccatcccataccctactacgacaagaactccccagttcatggttactggttccgggaaggagccattatatccagggactctccagtggccacaaacaag

SEQ ID NO: 21242 - DNA, 201 bp, Homo sapiens
tgctgtgggcaggtgagtggctgtggggagaggggttgtcgggctgggccgagctgaccctcgtttccccacaggggccctggctatggatccaaatttcyggctgcaagtgcaggagtcagtgacggtacaggagggtttgtgcgtcctcgtgccctgcactttcttccatcccataccctactacgacaagaactcccc

SEQ ID NO: 21243 - DNA, 201 bp, Homo sapiens
agcatcgtagacgccaggaggagggataatggttcatacttctttcggatggagagaggaagtaccaaatacagttacaaatctccccagctctctgtgcrtgtgacaggtgaggcacaggcttcagaagtggccgcaagggaagttcatgggtactgcagggcagggctgggatgggaccctggtactgggaggggttta

SEQ ID NO: 21244 - DNA, 201 bp, Homo sapiens
cccttcctcttttctgctcacacaggaagccctggaagctgcttcctcagacatgccgctgctgctactgctgcccctgctgtgggcaggtgagtggctgyggggagaggggttgtcgggctgggccgagctgaccctcgtttccccacaggggccctggctatggatccaaatttctggctgcaagtgcaggagtcagtg

SEQ ID NO: 21245 - DNA, 201 bp, Homo sapiens
cctgtttatctagattagaattcaccccaaatcttttttgtctgcagggaaacaagagaccagagcaggagtggttcatggggccattggaggagctggtrttacagccctgctcgctctttgtctctgcctcatcttcttcatgtgagcattttctctgggtcaggcatgggccagaggtgaagaggatggacctggtgt

SEQ ID NO: 21246 - DNA, 201 bp, Homo sapiens
aggctcaaagaccctggtgtctcccatcagagtgaagacccacaggaggaaagcagccaggacagcagtgggcaggaatgacacccaccctaccacagggycagcctccccggtgagtgatggggcatcctggcatccagtctgtcctgcagacacctcctcccaatgtggcccaccgtcatgccccattcagcatttcca

SEQ ID NO: 21247 - DNA, 201 bp, Homo sapiens
agtactgtcaggctttcaccatgttggccaggctggtcttgaactcctgacctcgggtgatctgcccacctcagcctctcaaagtgctaggactacaggcrtgagtcacagtgcccggccatataaagcctattttaagtctccatggccagagttttgttccacttctccctttccctcttcacccattcctgtaagtca

SEQ ID NO: 21248 - DNA, 201 bp, Homo sapiens
gtacatggccctgggtttattaaggaggattgtggtctggagtgtaagagctcaataaaggatccagctggtagtgtgggctttagattgactggtttgcmcatgaaaggtgcacttgtatgcaagtcctttattagctctagaaatctactatccttgggaaaggcagtctctcaagggtcagtaatgccccagatgtca

SEQ ID NO: 21249 - DNA, 201 bp, Homo sapiens; identical to SEQ ID NO: 5544

SEQ ID NO: 21250 - DNA, 201 bp, Homo sapiens; identical to SEQ ID NO: 5545

SEQ ID NO: 21251 - DNA, 201 bp, Homo sapiens
ctcataacaatggccccacagcctgagaaaaccaggctcaaagaccctggtgtctcccatcagagtgaagacccacaggaggaaagcagccaggacagcaktgggcaggaatgacacccaccctaccacagggtcagcctccccggtgagtgatggggcatcctggcatccagtctgtcctgcagacacctcctcccaatg

SEQ ID NO: 21252 - DNA, 201 bp, Homo sapiens; identical to SEQ ID NO: 5546

SEQ ID NO: 21253 - DNA, 201 bp, Homo sapiens
tttcttggccgggcacagtgtttcacacctgcaatcccagcacctttggaggccaaggcgggcggatcacgaggtcaggagattgagactatcctggctarcatggtgaaaccccgtctctactaaaaatacaaaaaattagccagatgtggtggctggcgcctgtagtcccagctacttgggaggctgaggcaggagaat

SEQ ID NO: 21254 - DNA, 201 bp, Homo sapiens
accaggctcaaagaccctggtgtctcccatcagagtgaagacccacaggaggaaagcagccaggacagcagtgggcaggaatgacacccaccctaccacarggtcagcctccccggtgagtgatggggcatcctggcatccagtctgtcctgcagacacctcctcccaatgtggcccaccgtcatgccccattcagcattt

SEQ ID NO: 21255 - DNA, 201 bp, Homo sapiens
ctccccagcttcctgtccggccctgtagtccttcccctccactcccttcctcttttctgctcacacaggaagccctggaagctgcttcctcagacatgccrctgctgctactgctgcccctgctgtgggcaggtgagtggctgtggggagaggggttgtcgggctgggccgagctgaccctcgtttccccacaggggccct

SEQ ID NO: 21256 - DNA, 201 bp, Homo sapiens
gggacctagaaggcacagccaggcaggtccaggagaactgtctgggtctaagaaggtctgagaaccacctccctgccccaccctgcttccaggcccttttkaaggccaaaaggaccacctttgaccctaagtgatggggccagtgggaagaaagaagagacaaggcctatcagcattccagtgctttctctctctctcatc

SEQ ID NO: 21257 - DNA, 201 bp, Homo sapiens
gggctgtttctcaggcctggaatgcaagcacattctgcctggggtcatgtctaaaagggttggctcacaaggctgtttctcaggccctaattgtgggagastggcctttgggcaggccagagtcatgtccacagaaggcgtctgggcaccgtaaggctgtttctcagagcctgtgtgtgagcacataaccactaccccagc

SEQ ID NO: 21258 - DNA, 201 bp, Homo sapiens
ttaataggttattttcatttcattgattgttttctgattgttttatatattcctggttccttacttcccctcttattgtttctttttgtggttggctgatkttttttttttttttgtagtgataagatttgattcctttctctttcttctttgtgtatgggctgtcagtgagttttaagttcacgtgtttttgccttttca

SEQ ID NO: 21259 - DNA, 201 bp, Homo sapiens
ctccactcccttcctcttttctgctcacacaggaagccctggaagctgcttcctcagacatgccgctgctgctactgctgcccctgctgtgggcaggtgartggctgtggggagaggggttgtcgggctgggccgagctgaccctcgtttccccacaggggccctggctatggatccaaatttctggctgcaagtgcagga

SEQ ID NO: 21260 - DNA, 201 bp, Homo sapiens
ggggtttaggggtaaagcctgtcgtgcttagcgggggagcttgaccagaggttgatcttctctcaggccctcacctggaccctccctcctgattctgcatyccctctttctcctcactagacttgacccacaggcccaaaatcctcatccctggcactctagaacccggccactccaaaaacctgacctgctctgtgtcct

SEQ ID NO: 21261 - DNA, 201 bp, Homo sapiens
ccctgctctaacccccttctttcctctccataagaaacaccagaagaagtccaagttacatggccccactgaaacctcaagctgttcaggtgccgcccctrctgtggagatggatgaggagctgcattatgcttccctcaactttcatgggatgaatccttccaaggacacctccaccgaatactcagaggtcaggaccca

SEQ ID NO: 21262 - DNA, 201 bp, Homo sapiens
gatcccagtaggaacaactgctccctgagcatcgtagacgccaggaggagggataatggttcatacttctttcggatggagagaggaagtaccaaatacarttacaaatctccccagctctctgtgcatgtgacaggtgaggcacaggcttcagaagtggccgcaagggaagttcatgggtactgcagggcagggctggga

SEQ ID NO: 21263 - DNA, 201 bp, Homo sapiens; identical to SEQ ID NO: 5560

SEQ ID NO: 21264 - DNA, 201 bp, Homo sapiens
atatcaaacattattttggttaccgtaagtttgaggtgcctctgagacatccatgtggagatgacaagtagcaggcaagtgtctggagctcagaagagggmtccacgtgggagacacagaggttgggagcttccctatcaacatccaataatcgatgaatctacaaagaagagaaggggtccacagacacagccctggaac

SEQ ID NO: 21265 - DNA, 201 bp, Homo sapiens
aaagaatggcctttgggcaaacacctgcagaaagaaagtgagtacagtatgagcagtagagaatcatcaaggaagcagcaagtaccatggctctgaggccrgaacacatctgatgttttagagaaacaaagtaggacagtgtggataaggcagagttacgtgttgggggtggagtgtggactgaacaatggtaggtaggaa

SEQ ID NO: 21266 - DNA, 201 bp, Homo sapiens
ctggtgtctcccatcagagtgaagacccacaggaggaaagcagccaggacagcagtgggcaggaatgacacccaccctaccacagggtcagcctccccggygagtgatggggcatcctggcatccagtctgtcctgcagacacctcctcccaatgtggcccaccgtcatgccccattcagcatttccagaactgagcttat

SEQ ID NO: 21267 - DNA, 201 bp, Homo sapiens
ctgtgagcagggaacacccccgatcttctcctggttgtcagctgcccccacctccctgggccccaggactactcactcctcggtgctcataatcaccccayggccccaggaccacggcaccaacctgacctgtcaggtgaagttcgctggagctggtgtgactacggagagaaccatccagctcaacgtcacctgtaagtg

SEQ ID NO: 21268 - DNA, 201 bp, Homo sapiens
ccctcacccacgggagcgggagaattcgccctgcttgtctatgcgatgctcgtggtcctgaactgtacacgcattagttcccgggcaccgcagcctccacrccagcccctctaacagtcaccacgaccttgtgaagtgtcaagactgttgtcatcgtctctgtcttaggtgtgaacaactgtggctcagtgaagtcaagga

SEQ ID NO: 21269 - DNA, 201 bp, Homo sapiens
tacctgagtggcatgatgccaccgtcccaatccctcacccacgggagcgggagaattcgccctgcttgtctatgcgatgctcgtggtcctgaactgtacasgcattagttcccgggcaccgcagcctccacaccagcccctctaacagtcaccacgaccttgtgaagtgtcaagactgttgtcatcgtctctgtcttaggt

SEQ ID NO: 21270 - DNA, 201 bp, Homo sapiens
ctgagcaacagagtgagaccctatctcaaaaaaataaaaaattcctggaaatatgcaaaagtcatggtccttcatggtggtccagagtcacgtggaggtasaaaagcccctccccatagattcagaaatgacctctttggggtggggggtgagggaacagaggtgttgtctgaggatgtcatgctccagatgacagtcttt

SEQ ID NO: 21271 - DNA, 201 bp, Homo sapiens
aactggtccttctttgcctctcttgattcccattttccttctttcatgtaatttctcattttgcaaagtgggggaggaggtgcccacccccaatttaaagrgaccctgaagaatctgaattctgttccccaggggcagactaaagcagcccaggggagatggagatgccctcaggctctgctcctccaggcccctcacccc

SEQ ID NO: 21272 - DNA, 201 bp, Homo sapiens
tcctggaaatatgcaaaagtcatggtccttcatggtggtccagagtcacgtggaggtacaaaagcccctccccatagattcagaaatgacctctttggggyggggggtgagggaacagaggtgttgtctgaggatgtcatgctccagatgacagtctttttttttttttttgagatggagtcttgctgtctcccaggctgg

SEQ ID NO: 21273 - DNA, 201 bp, Homo sapiens
agacccccaaagctaaatatgccgggtacgtttaaggcccctttaaggtggataactccccctctgccctcagcccagaaaagcttgtttccaataggccktggctggagggtggggaaatgtcccatccttcgcggaatgtgtgggattgtgggtcagttccatggggtacctgcttgccccagccaccagtgagtaccc

SEQ ID NO: 21274 - DNA, 201 bp, Homo sapiens
cttgccaacatggtaaaaccctgtctgtactaaaaatacaaaaattagctgggcgtggtggcaagtgcctgtagtcccagctactcaggaggctgaggcaygagaatcatttgaacccaggaggcagagattgcagcaagctgagatcacgccactgtactccagcctgggtgactgagcaagaccccatctcacaaaaaa

SEQ ID NO: 21275 - DNA, 201 bp, Homo sapiens
atgaataatatttcattgtatgaatgtagcacattttgtttattgttgcatctctttgtttatagttttttggtttgttttttttttttttgagacaaagycttgctctgtttcccaggctggagtgcgatcatgactcactgcaacctcgatctcctggggtcaagtgatcctctcgcctcagcctcccaaagtgctgag

SEQ ID NO: 21276 - DNA, 201 bp, Homo sapiens
cgtctcgcaccttgctgctgtctgtaaccccccagcacctcccgcaggcctggacgtcttatccctctccttagccccaggagcgtgtttcaggaactctmctcacctctgtgtcttgtgttttgcagtgatcagggccaaagcggtcagtgagaaggaagtggactctggaaacgacatttatggcaaccctatcaagag

SEQ ID NO: 21277 - DNA, 201 bp, Homo sapiens
tggaaatgtattccggagagctctctctccctcctcctctgtccaccactgggcattggaaactctccttctctgtgttcctatccatcgtctgtcatctygcctggattggatgctcctcccaggcaaggcctgctgtatgcaggattcaccctgtaccctctcttcacctgctgtcacctctgggcaacaacccccgac

SEQ ID NO: 21278 - DNA, 201 bp, Homo sapiens
ttcccctcctccctggggaagtaggaatctgatcacaaacttaagaaaaaaagaatagacaaggcctggtgcagtggctcatgcctgtaatcccagcaatktaggaggctgaggcgggcggattgcttgaggtcaggagttcaagaccagccttgccaacatggtaaaaccctgtctgtactaaaaatacaaaaattagct

SEQ ID NO: 21279 - DNA, 201 bp, Homo sapiens
gagaaggaagtggactctggaaacgacatttatggcaaccctatcaagaggatccagtatgagatcaagcagataaaggtaatagtggctgccggcatccygggctgcactgtgggcacagctgtggggtgttggggttggcagagagcctgggtccctggaacacgatctggccacctgtggactagagcagaggatgag

SEQ ID NO: 21280 - DNA, 201 bp, Homo sapiens
ccagttaaggaacattattcccctcctccctggggaagtaggaatctgatcacaaacttaagaaaaaaagaatagacaaggcctggtgcagtggctcatgsctgtaatcccagcaatgtaggaggctgaggcgggcggattgcttgaggtcaggagttcaagaccagccttgccaacatggtaaaaccctgtctgtactaa

SEQ ID NO: 21281 - DNA, 201 bp, Homo sapiens
gaagtggggctgttcctagacgcggtccagggctcgtttcccaggctcggggggtggggaggcggagtagctgaggaacagtgaggcagggtacggagccytctcggccacttcccgtcagagaatgctagtgaatgttcactacctgccaatttcctgggaaatttgagattggtggacaaaaaaaagggagcatttttg

SEQ ID NO: 21282 - DNA, 201 bp, Homo sapiens
caaagagctttctgcagtgatggaagcggtctctgcaccatccagtccagcagcccccagccttgtggctcatgagcacccgagatatggctagtgcagcygaggagctgcattttaaattttatttcatttcaagtaattttagtataaatgtaaacagccacatgtggccggcagccgcagtctagcatggcactgact

SEQ ID NO: 21283 - DNA, 201 bp, Homo sapiens
tctcgctggacgttggaggaaagaaggaatatctcattgcaggtgtgtatgagtggggccatcagccggaggctggcacagaagtggggctgttcctagaygcggtccagggctcgtttcccaggctcggggggtggggaggcggagtagctgaggaacagtgaggcagggtacggagccctctcggccacttcccgtcag

SEQ ID NO: 21284 - DNA, 201 bp, Homo sapiens
ttttattttatttatttatgagacggaggcaacaaagcccaggctggagtgcagtggcgcgatcttggctcactgcaacttccgccccccaggttcaagcrattttcctgcctcagcctcctgagtagctgaggttacaggcatgcaccaccacgcccagctaatttttgtatttttttagtagagacggggtttcatcat

SEQ ID NO: 21285 - DNA, 201 bp, Homo sapiens; identical to SEQ ID NO: 5592

SEQ ID NO: 21286 - DNA, 201 bp, Homo sapiens; identical to SEQ ID NO: 5607

SEQ ID NO: 21287 - DNA, 201 bp, Homo sapiens; identical to SEQ ID NO: 5600

SEQ ID NO: 21288 - DNA, 201 bp, Homo sapiens
aactgtaatcataaacatatactccaaatccaaatatccatgattgggggattttcttctggtttaggtgacatgtacttttttcccttctaaaaatcaaygtgtgcttagtgagcacctgttaggtgcccagccccgtgttagagacaatgggagattcccacggtgagatccttggctctggtcatcatggagcacaca

SEQ ID NO: 21289 - DNA, 201 bp, Homo sapiens
gccaaggatgatgtttgagcagaaacgaacgtgaataaaaaaagacagctggttgcggtggatgagaggatggttaggagggcactggaaatagggggccrtcagggcaaagccgtctgttctggagtggcctgccgggagacatttcctagatgtggcttttcaggatgaggcctggattagcctgggaaacaggaacct

SEQ ID NO: 21290 - DNA, 201 bp, Homo sapiens
ccactgggttcaagcgattctcctgcctcagcctcccgagtagctgggattacaggtacccacgaccatgcccagctaatttttgtatgtgtagtagagayggggtttcaccatgttggccagactagtcgcaaatgcctgacctcgagtgatgtccctacctcagcctcccaaagtactgggattacagccatgagccac

SEQ ID NO: 21291 - DNA, 201 bp, Homo sapiens
cagctacttgagaggctgaggcaggagaatcacttgaacctgggagatagaggttgcagtgagccaaaacggtgccactgcactccagcctgggcaacagmgcgagactccatctcaacaacaacaacaacaaaaattactcatagaacattttccaggtcaggaaagatgagaagagctggatagacctttccagatgta

SEQ ID NO: 21292 - DNA, 201 bp, Homo sapiens
cttacatgtcctcctccttgtctttccagatgttcaaagggcctgagaaggatatagagtttatctacacggccccctcctcggcagtgtgtggggtctcrctggacgttggaggaaagaaggaatatctcattgcaggtgtgtatgagtggggccatcagccggaggctggcacagaagtggggctgttcctagacgcgg

SEQ ID NO: 21293 - DNA, 201 bp, Homo sapiens
gtgaaaatccatctctacaaaaaaccagccaggcatggtagcgcccacctgtggtcccagctattcgggaggctgaggtgggagaatcgcttaagcccagkaggcagaggttgcagtgagacatctcaccactgtattccagcctgggtgacagagtgagagcttgtattaaaaaaaaaaaaaaaaaatatgtggcaggga

SEQ ID NO: 21294 - DNA, 201 bp, Homo sapiens; identical to SEQ ID NO: 5589

SEQ ID NO: 21295 - DNA, 201 bp, Homo sapiens
ggcatgtgccaccacgcctggctaattttgtatttttagtagagacgggatttctctgtgttggccaggctggtctcgaactcctgacctcaggtgatccrcccacctcggcctcccaaagtgctgggattacaggtgtgagccaccgcacctgggcggcattaagtacattcacagtgttgtgtaactatcactatctat

SEQ ID NO: 21296 - DNA, 201 bp, Homo sapiens
tgttagagacaatgggagattcccacggtgagatccttggctctggtcatcatggagcacacagatgttccgaatggggagactggaaaagaaagaaaatmgattttgcttgtggagaattgtgaatagtaagtgaatgcttagaaggtgcaaaaggggccgggcgaggtggctcacgcctgtaatcctagcactttggga

SEQ ID NO: 21297 - DNA, 201 bp, Homo sapiens
ggaggaggctgggcatcatctctcagcctggaggaggagacgccatgccgggggctgggatcaccatgccccttgcccgtctcgcaccttgctgctgtctstaaccccccagcacctcccgcaggcctggacgtcttatccctctccttagccccaggagcgtgtttcaggaactctcctcacctctgtgtcttgtgtttt

SEQ ID NO: 21298 - DNA, 201 bp, Homo sapiens
ccactggagagaaggaaaaaaaaagccaaaagcactcaagcatgatatcaacagatgagcttcagtcaaatcaatgactgcctcccactgttacagaaacygccttggtcacaagggactctgggcttctggcttgggcccctgtcaacaaagaagggattcttgttgaagaatcgtggaaggaggaggaggaggctgggc

SEQ ID NO: 21299 - DNA, 201 bp, Homo sapiens
ggaggagacgccatgccgggggctgggatcaccatgccccttgcccgtctcgcaccttgctgctgtctgtaaccccccagcacctcccgcaggcctggacrtcttatccctctccttagccccaggagcgtgtttcaggaactctcctcacctctgtgtcttgtgttttgcagtgatcagggccaaagcggtcagtgagaa

SEQ ID NO: 21300 - DNA, 201 bp, Homo sapiens
cagccccagcctgagcaacagagtgagaccctatctcaaaaaaataaaaaattcctggaaatatgcaaaagtcatggtccttcatggtggtccagagtcaygtggaggtacaaaagcccctccccatagattcagaaatgacctctttggggtggggggtgagggaacagaggtgttgtctgaggatgtcatgctccagat

SEQ ID NO: 21301 - DNA, 201 bp, Homo sapiens
tctcaacaacaacaacaacaaaaattactcatagaacattttccaggtcaggaaagatgagaagagctggatagacctttccagatgtaagacccccaaasctaaatatgccgggtacgtttaaggcccctttaaggtggataactccccctctgccctcagcccagaaaagcttgtttccaataggccgtggctggaggg

SEQ ID NO: 21302 - DNA, 201 bp, Homo sapiens
attgtgagacctgcccagtggccagctggctgtgtatcttctccaccaatgaggctgcattacttcatcctcctctccctgggagggggagcaggggtgargctgttaatggccacagtggctgactcacctcatggcgagaggaacctctctcatctgacttctttcccagccttggtcagatgactccacattgaatct

SEQ ID NO: 21303 - DNA, 201 bp, Homo sapiens
tcagtttcgtcacactgccctctaggggctttctggccaaactgcagcgctgcggaaggactcttgggtgcaaaagtgaccttggtctgagccagcaccgstgtccaaacatacccagctgaatcctcgcccatgctgaagctctctgtttgtttttgtttttgttcgagatggagtctctctctgttgcccaggctggag

SEQ ID NO: 21304 - DNA, 201 bp, Homo sapiens; identical to SEQ ID NO: 5590

SEQ ID NO: 21305 - DNA, 201 bp, Homo sapiens
gtgtccaaacatacccagctgaatcctcgcccatgctgaagctctctgtttgtttttgtttttgttcgagatggagtctctctctgttgcccaggctggartgcagtggcacaatctcgggtcactgcaatctctgcctcccgggttcaagcagttctcctgcctcagcctcccaagtagctgggattacaggtgcccaac

SEQ ID NO: 21306 - DNA, 201 bp, Homo sapiens; identical to SEQ ID NO: 5596

SEQ ID NO: 21307 - DNA, 201 bp, Homo sapiens
aaacacctgctcgagttcgaatgtgtgctctgacacctgactcgttaatgtccttggccaagtaactttacctgtctgtgcctcccatgccgatccgtacrtgggggatgatgacagtagtatctgccccacgaggggttgttgagaggatgaaagtgggagtaggagaccagaaatgatgatcacagagatgctggttat

SEQ ID NO: 21308 - DNA, 201 bp, Homo sapiens
atggcccaaagggaagcacacctgcagtaggagggggggcagcggtgggcagggcacagcttccctgcaggttagaccccctcgcaggccagctgcctgcycctgcaggaaccgtgggtctcgggagaggctgccatccctgcacatgacaggtaggcacattgccgggttctggacatgcccccagagcagcctctgccc

SEQ ID NO: 21309 - DNA, 201 bp, Homo sapiens
cctcccatgccgatccgtacatgggggatgatgacagtagtatctgccccacgaggggttgttgagaggatgaaagtgggagtaggagaccagaaatgatkatcacagagatgctggttatcttggtcaggccccactcaagggtagctgataattttatgtcttacactggagatgacagtgacccatacacgcagcaca

SEQ ID NO: 21310 - DNA, 201 bp, Homo sapiens
tggcgggcgcctgtagtcccagctactcaagaggctgaggcaggagaatggcgtgaacccgggaggcggaacttgtagtgagccgagatcgtgccactgcwctccagtctgggcgacagagtgagactccatctcaaaaaaaaaaaaaaaaaaagaaggtacaaaaggaagagagactctcacaggtccaagggtctagac

SEQ ID NO: 21311 - DNA, 201 bp, Homo sapiens
acgcctgtaatcctagcactttgggaggccgagacgggcagatcatgaggtcaggagattgagaccatcctggctaacacagtgaaaccccgtttccactraaaatacaaaaaaaaaattagccgggcgtggtggcgggcgcctgtagtcccagctactcaagaggctgaggcaggagaatggcgtgaacccgggaggcgg

SEQ ID NO: 21312 - DNA, 201 bp, Homo sapiens
ctttttaaggatgaataatatttcattgtatgaatgtagcacattttgtttattgttgcatctctttgtttatagttttttggtttgttttttttttttttgagacaaagtcttgctctgtttcccaggctggagtgcgatcatgactcactgcaacctcgatctcctggggtcaagtgatcctctcgcctcagcctccca

SEQ ID NO: 21313 - DNA, 201 bp, Homo sapiens
gtcctcttgggtgctggctgtaccccagctacaggttgtgccgcccagggtgttctggatgggaacggaattcaccaactgtgtggcctccctctgcttayatgtcctcctccttgtctttccagatgttcaaagggcctgagaaggatatagagtttatctacacggccccctcctcggcagtgtgtggggtctcgctgg

SEQ ID NO: 21314 - DNA, 201 bp, Homo sapiens; identical to SEQ ID NO: 5601

SEQ ID NO: 21315 - DNA, 201 bp, Homo sapiens
gtgaggcagggtacggagccctctcggccacttcccgtcagagaatgctagtgaatgttcactacctgccaatttcctgggaaatttgagattggtggacmaaaaaaagggagcatttttgccttttgttcctaaaagggaggcgagtgcgggatgctggagacatgcagggcagagaaaccctttctgccgtcgggaggg

SEQ ID NO: 21316 - DNA, 201 bp, Homo sapiens
ggaggaaagaaggaatatctcattgcaggtgtgtatgagtggggccatcagccggaggctggcacagaagtggggctgttcctagacgcggtccagggctygtttcccaggctcggggggtggggaggcggagtagctgaggaacagtgaggcagggtacggagccctctcggccacttcccgtcagagaatgctagtgaa

SEQ ID NO: 21317 - DNA, 201 bp, Homo sapiens
tcccatccttcgcggaatgtgtgggattgtgggtcagttccatggggtacctgcttgccccagccaccagtgagtacccactggagagaaggaaaaaaaaagccaaaagcactcaagcatgatatcaacagatgagcttcagtcaaatcaatgactgcctcccactgttacagaaactgccttggtcacaagggactctgg

SEQ ID NO: 21318 - DNA, 201 bp, Homo sapiens
gtgaatgttcactacctgccaatttcctgggaaatttgagattggtggacaaaaaaaagggagcatttttgccttttgttcctaaaagggaggcgagtgcrggatgctggagacatgcagggcagagaaaccctttctgccgtcgggagggccaaaagctcgcgtaacatctgtggatactatgcacgagacctgcttgac

SEQ ID NO: 21319 - DNA, 201 bp, Homo sapiens
aaggcccctttaaggtggataactccccctctgccctcagcccagaaaagcttgtttccaataggccgtggctggagggtggggaaatgtcccatccttcrcggaatgtgtgggattgtgggtcagttccatggggtacctgcttgccccagccaccagtgagtacccactggagagaaggaaaaaaaaagccaaaagcac

SEQ ID NO: 21320 - DNA, 201 bp, Homo sapiens
aggcaggagaatcacttgaacctgggagatagaggttgcagtgagccaaaacggtgccactgcactccagcctgggcaacagcgcgagactccatctcaayaacaacaacaacaaaaattactcatagaacattttccaggtcaggaaagatgagaagagctggatagacctttccagatgtaagacccccaaagctaaat

SEQ ID NO: 21321 - DNA, 201 bp, Homo sapiens
gggacagagcctttgacccctggtccctggagagccctgaggcacatctctgacaggggatgtctggaggccgggcgctgcggctcacgcctgtaatcccrgcactttgggaggccgagataggtgggtcacttgaggtcgggagttggaaatcagcctcaccaacatggcgaaaccctgtctctacaaaaatacaaaaat

SEQ ID NO: 21322 - DNA, 201 bp, Homo sapiens
acggcaaaaccccatctctacaaagatcagtcgggcatggttgcttgcacctgtagtcctagctactcaagaagctgaggtaggagaatcccttgagcccwggaggttgaggctgcagtgcgcattgctccactgcactctagcctgggcgacagtgagaccctgtctcaaaaaaaaatagaggttgggaactgtctctag

SEQ ID NO: 21323 - DNA, 201 bp, Homo sapiens
gatctctgcacaaccaatcacctcaacaagtgtttggatttctgttccaggagcagctgacagacgaagaaaagtgctggacaggaagggagaattctgaygccaacatgcagcgaagtatcatgtgagcaccctcccttgcccctgagtctttccttctccaagtcctctgtttctttctctaaatctgtacttaaaaaa

SEQ ID NO: 21324 - DNA, 201 bp, Homo sapiens
tttaaaaatatattgtgaaggggtaacgtattccaattgttctgcctgcaaaagcatgcatattaaaaaatctccctccagcgtctgtccctcctgaggcracagcattaccagttttttgtcttccaactgagatgttctgtacatatacaagatatgtggatacatttatagtctttcttttgtttttgttttttgaga

SEQ ID NO: 21325 - DNA, 201 bp, Homo sapiens
tttttaaaaatatattgtgaaggggtaacgtattccaattgttctgcctgcaaaagcatgcatattaaaaaatctccctccagcgtctgtccctcctgagrcaacagcattaccagttttttgtcttccaactgagatgttctgtacatatacaagatatgtggatacatttatagtctttcttttgtttttgttttttga

SEQ ID NO: 21326 - DNA, 201 bp, Homo sapiens
ccagtttatagaaggggaaatggagacatggggaggcaaactaagccacttgtctcctgccactggctcaaagcaaggaccatgctggggtcctgaccatyacagtcaccagggcgggcgccaggctcagttctctccctgactcatcctcctcaagcctcgccaacccctcagggcagctgagatgggaggtgctggtgc

SEQ ID NO: 21327 - DNA, 201 bp, Homo sapiens
cagcgccggcctactgagttttttgattccaaaattgagtttgagttgtggtgccaacatgtggcggccaaggctgtagagagtagtggagacttagaggygtgtggtgcgggacagagagtactgattccagaaaacgaaaggggaccccatgggttgaagaagatttctgtgcaaaggaagggaaagtcaaagaaaacc

SEQ ID NO: 21328 - DNA, 201 bp, Homo sapiens
gtgaggtctgcctcggcttgggcgcgggccctgcagcaggaagccagggtttgtttgccatgacagtgagagcaaatccattgagggctcacatcatggarcatttcttgggagccctgccctgtgccccgtgccttacctcatcagttcctaccagcaactctgtgagactggtcttgttaccctcacctccagtttata

SEQ ID NO: 21329 - DNA, 201 bp, Homo sapiens
ccaagaagatagacatcatcaaaggcctctttgtggcctgccgccactcagaagcccggttcatcgctaggtaagcgtgtgggcctgtgaggctacagagsgggactgcaggctcggaggtgaaaggagggagggactggcagctggaatcatcacaaatgccctgaccatccttggatgagaaaagcatgagcaggaggc

SEQ ID NO: 21330 - DNA, 201 bp, Homo sapiens
tgattctcctgcctcagcctcctgagtagttgggattacaggctggcaccaccatgcctggctaattttttgcatttttagtagagatggggtttcaccatgcgggccaggctggtcttgaactcctgacctcgtgatccgcctgtctcagccttccaaagtgctgggagtacaggcgtgagccacagcgccggcctactg

SEQ ID NO: 21331 - DNA, 201 bp, Homo sapiens
gtggcccacgcctgtaatcccagcactttgggaggctgaggcgggtggatcacctgaggtcaggagttcaagaccagcctggctgacatggtgaaatcccrtctctactaaaaatacaaaaattagctgggtgtggtggcacgcacctgtagtcccagctacttgggaggctgaggcacgagaatcgtttgtacccaggag

SEQ ID NO: 21332 - DNA, 201 bp, Homo sapiens
tgttcgttcattacggattgctttccctttcattcttttctgtgttagggttagggcgttatctcgataggtgtaggcaggttatgttatctccacatttyatttcagaccagaaaagaggtgacacacagtatctggtgacaagggtgtgttggttctgataggttgagagctgcttgtcacagctgtcaccgtgacttg

SEQ ID NO: 21333 - DNA, 201 bp, Homo sapiens
tgtcaggcatagagtaggcttcccagtaaacgcttatgtatttctccttcccttgcaactcagtctggtggttaagaggtgagctgtggagcaggccgacytggggtggaacgtactatagatgcaggttaagttcctttgaaaacccctctgtgccttagtttctgtaacagagttgttgtggagagtcagtataattga

SEQ ID NO: 21334 - DNA, 201 bp, Homo sapiens
taccagacccagcacacacggggtcggttaagaatactctgagctgcaggtaacagaaaacccaactacattggcttggacaaagaaggatctgtttttcycacaaaagaagttgcagatgctggctttcctgcccaacaatccatggcagctggggcctcttccactgtctcatgcctccacccttgatgggtcgtgttc

SEQ ID NO: 21335 - DNA, 201 bp, Homo sapiens
gatggtggagagaggctgtgaaacagggttgaggagaaggctgagagggaggagagcctgatggggacagatttgcaggggtgtgggagagaacacaggggcagcagttcaggtgagggaggaccaggcatgtgctgggacagggggtgtggggtgcagggaaggggagggctggggaaagatgctggaggcagagacagc

SEQ ID NO: 21336 - DNA, 201 bp, Homo sapiens
ggaggggctgaagggagctaaggggcggggccggggaaaagattgcgtgtgggcggggccacctggaagggggaggtgccaagggtggggctggctgggarccggaagtgctgagggggcgggggccacctggaagtgctgagggggcggggctagaagaaggtaaatcgcgggcagcagcatcacctggaaggagtgggc

SEQ ID NO: 21337 - DNA, 201 bp, Homo sapiens
atcttcagcaggaatcaggaagacaacactgggaagtacccggacatcatcagccgcatccccaaggtgggcgtctgcctcacacttgcactctgccaggrtctgtggtcaggggtgcaaaggcctgaggcccatctaggccagtgtggcacagtgcggggtttattgggaggagatcaggttgcgtttggctgcaaatga

SEQ ID NO: 21338 - DNA, 201 bp, Homo sapiens
gagagatggtggagagaggctgtgaaacagggttgaggagaaggctgagagggaggagagcctgatggggacagatttgcaggggtgtgggagagaacacaggggcagcagttcaggtgagggaggaccaggcatgtgctgggacagggggtgtggggtgcagggaaggggagggctggggaaagatgctggaggcagaga

SEQ ID NO: 21339 - DNA, 201 bp, Homo sapiens
gcagacagtggatgtcagggtgaggaggcaggaggaatgcctccaggatctccctgggtgactggatggatgacaaagccgtcggcagcttgggaccctgrtgaggggcaggcacctgcagggggcattaatcaccccagcgtggggcaggcatgagcaacctctatctgtgggcccccagggccatccaggaagtttgga

SEQ ID NO: 21340 - DNA, 201 bp, Homo sapiens
agaggtctgaaaggactttgactggagggattggaaggagtgggaggaaagaacatggtgtgtggggggccagcagcctgaaggggcccagccgccagtgstgggtggaaaggctggtgatgcggatggcccgcctgccaagggcctggagtgctcggtgcttatcatgaggacactggggagccatggaaggattgtgag

SEQ ID NO: 21341 - DNA, 201 bp, Homo sapiens
gggaggccgaggcgggcggatcatttgaggtcaggagttcgagaccagcctgaccaacacgttgaaaccccgtctctactaaaaattaaaaaaaattagcygggcatggtggtgcgcaccggtagtcccggctactccggaggagaatcacctgaacccacaaggtggaggttgcagcgagccgagatcgtgccactgcac

SEQ ID NO: 21342 - DNA, 201 bp, Homo sapiens
aacacaaaattagcccagcatggtggcgggtgcctgtaatcccggctactcaggaggctgaggtacgagaatcacttgaacccaggaggcagagattgcastgagctgagatcacgctattacaccccagcctgggtgacagagtgagactctgtctcaaaaacaaacaaacaaaattatcatgggtacggctcattctgc

SEQ ID NO: 21343 - DNA, 201 bp, Homo sapiens
ctcccccactgtaaccgtccggtgggttcaccttgcccgctgcctagacagagccgatttatctagacgggggaactgcagtggagaaagagtcattcccrcagagctggctgtgcgggagaccggagtttcatttttactcaaatcagtctccctgagcatgtggggagcagagtttttaaagataatttggcgtgtagg

SEQ ID NO: 21344 - DNA, 201 bp, Homo sapiens
gcctggccaacatggtgaaaccccatctctactaaaaacacaaaattagcccagcatggtggcgggtgcctgtaatcccggctactcaggaggctgaggtrcgagaatcacttgaacccaggaggcagagattgcagtgagctgagatcacgctattacaccccagcctgggtgacagagtgagactctgtctcaaaaaca

SEQ ID NO: 21345 - DNA, 201 bp, Homo sapiens
actttgaaggcccctgtgactatatcaggcccacctggatagtccagggtaatcccactatcggaaggtcagctgattagcaacctcaattaccctttgcyatgtaacctaacatattcccaggttccaggtattagaatagagatctcttttggagcttagactttaccctgaggcttctggggagctaggaagagtttt

SEQ ID NO: 21346 - DNA, 201 bp, Homo sapiens
agaccagcctggccaacatggtgaaaccccatctctactaaaaacacaaaattagcccagcatggtggcgggtgcctgtaatcccggctactcaggaggckgaggtacgagaatcacttgaacccaggaggcagagattgcagtgagctgagatcacgctattacaccccagcctgggtgacagagtgagactctgtctca

SEQ ID NO: 21347 - DNA, 201 bp, Homo sapiens
ctcttgcctccccttctcccagctgaagaaggactaccttgatggcgtgggtgacaccctggacctggtggtgatcggcgcctacctgggccgggggaagygggccggccggtacgggggcttcctgctggcctcctacgacgaggacagtgaggagctgcaggccatatgcaaggtcctggggaactggggctgatggca

SEQ ID NO: 21348 - DNA, 201 bp, Homo sapiens
gacgtttgagaagatcgaggaggtgtctgctcggtaactaatgaggactgcctgggtggggggcggggtcgcttctgggtctgtcctctgcatggcggtcygtgctgccttgttccgccaaaccctgtcaacttggcctctgaccccgctcgggcgtatgatcatggatgtcagacatggtcacaaaagcggctgcaggtc

SEQ ID NO: 21349 - DNA, 201 bp, Homo sapiens
gaccatcctggctaacatggtgaaaccatgtctctatcaaaaatacaaaaaattagctgggcgtggtggcgggcgcctgtagtcccagctactcgggaggmtgaggcaggagaatggcgtgaacccgggaggcggagcttgcagtgagccaagatcgtgccactgcactccagcctgggtgacagagcaagactctgtctc

SEQ ID NO: 21350 - DNA, 201 bp, Homo sapiens
ttgttttcatccagctctgcaccgtgtgccttgaacagagcctggcacatcacagttggaaggaatgactttgctttgacccagggctctatgcaattcartctccgttttgcctccgtagacccctggatccatctggttacaatcctgccaagaacaactatcatcccgtggaagatgcctgctggaaaccgggccaga

SEQ ID NO: 21351 - DNA, 201 bp, Homo sapiens
ttcctcacctctcagatgggggcacagtgatgagaggaagcatgttcttccacccactcttccccacgtgccaggcactcagcaacgggctttccctgacscaatgctccaaatcctcacaacactgctgggagtagattctgttgttatcctggtttcctgggtgagaaaagtaaagcggggaggtgggacagtattgag

SEQ ID NO: 21352 - DNA, 201 bp, Homo sapiens
agcgaggtcctgaaacgctttgaggaggcagctttcacctgcgaatacaaatatgacgggcagagggcacaggtatggggagtgggacatgtcccttccayagacaggaaaacgtcaaagagcaggggtgtggggtcactgaggcctgagcttcaagccggcctgcgccacagactgccgagccctcgctcatctctctgg

SEQ ID NO: 21353 - DNA, 201 bp, Homo sapiens
ctatagcctttctcttttacacagttcagtagcacacactctgtgatattctgccctttgtttgaaataacagcataccttagaaactgcccaagagctartttatgtagaccagcgggtacaattttataagcttccacagttgtttcacggaattatgtcatcaccttaaaacaatttttcactaacctttaaacttaa

SEQ ID NO: 21354 - DNA, 201 bp, Homo sapiens
tcgctcttgcgtctcttttccttccctagggttccttacctggctgtggcccggacgtttgagaagatcgaggaggtgtctgctcggtaactaatgaggamtgcctgggtggggggcggggtcgcttctgggtctgtcctctgcatggcggtctgtgctgccttgttccgccaaaccctgtcaacttggcctctgaccccg

SEQ ID NO: 21355 - DNA, 201 bp, Homo sapiens
aggtgggttaaaaagtatgacgcagtgagtccaaaatctctttgatgtcacgcctctacaaatgaaacagataacgacaagaaattctttcagctttaacrtttcatgattacagtttaagtctaacaaaaaagtgttcggaggattcttgacatcaattttgtacccccaattgagaccttatcaaggaggttaaatagc

SEQ ID NO: 21356 - DNA, 201 bp, Homo sapiens
tcctcctcttgcaggacttggcaaaccttttctataaagagccagagagtaaatattttaggctttatgggacacatttggcccctgttgcaaaaccattmttagatcccagaacctgtagaaacggtccagggtcggagtttgctgaccgtggccccagccaccctctgaccctgcctccagtctttcatcctcagtctg

SEQ ID NO: 21357 - DNA, 201 bp, Homo sapiens
gacacagggaggtgcagggactcgccacaagcacacacagctggagaaaattcatccaggccgcgagagaagggagacacgcagccacaactgtcaccctygacacccccacccgcgctctcccctgaaggtcggcagctggagtccgtccgggctgaggcagccgagaaaggcgacgtggggctggtggccgagaacagc

SEQ ID NO: 21358 - DNA, 201 bp, Homo sapiens
cccacctcggcctcccaaagtgctgggattacaggcgtgagccagtacacctggcctgaactcaccagatttagtgtatgtgctggaagcctgcaggcgcrtctactctgccttaaaattcactgaacaccccttctttgccagccctgggcggcccacgaggatgaaccatagagagccggccgccctgccccagccctc

SEQ ID NO: 21359 - DNA, 201 bp, Homo sapiens
agctgctgggaggagtgggaatattttcttctcatgacgatgagatttctttttaccactattcctaagtctcctatttcaggccaagtgctagaattcckctagttagcactgaggagtagacagcaggcctgagatctcagctcaaagctaacagaaaggaaaagggtaggtgtagttatatcttccatctgcagggtc

SEQ ID NO: 21360 - DNA, 201 bp, Homo sapiens
agaagaggccacccctgagttagggctgagaccatagggtcagaaaggagggtagacagagaggtttcagtcccctctactctcaacttttggaaaatggrgtccctccttcccccgctcactctagaactgttctttcctcttccagaagcctgccctggactgctcacaggtctccccgccccgtcctgccacatctcc

SEQ ID NO: 21361 - DNA, 201 bp, Homo sapiens
ggagtttctttttgaaggggaaattcatgtttctgtttttttttttttctttctttcttaaagaaagggttttatgtgtgtttagatctctgcacaaccartcacctcaacaagtgtttggatttctgttccaggagcagctgacagacgaagaaaagtgctggacaggaagggagaattctgacgccaacatgcagcgaa

SEQ ID NO: 21362 - DNA, 201 bp, Homo sapiens
gatggatgaaatgatgagatttgctgaggagacaaccagaaaatgttcattggatgcttgaaaggaagggaaggaaacagcaaagaaaccaaagtgtttgygggcagtgcccccactctgcctgctgtagtcgcccctttacacccccatttccccaccttccagggcggcactgaaggagtggaatggagtggtgtccga

SEQ ID NO: 21363 - DNA, 201 bp, Homo sapiens
taggcagggactccatttgctcctcagcatcacccatcacagggcaggcactctggagacttccagagatgtgtgatgggtgggtgagtggatgagtgggygggtggattaatgcactgatggatgaaatgatgagatttgctgaggagacaaccagaaaatgttcattggatgcttgaaaggaagggaaggaaacagcaa

SEQ ID NO: 21364 - DNA, 201 bp, Homo sapiens
actttgggaggccgaggcgggcggatcatttgaggtcaggagttcgagaccagcctgaccaacacgttgaaaccccgtctctactaaaaattaaaaaaaawtagccgggcatggtggtgcgcaccggtagtcccggctactccggaggagaatcacctgaacccacaaggtggaggttgcagcgagccgagatcgtgccac

SEQ ID NO: 21365 - DNA, 201 bp, Homo sapiens
gcctcggcctcccaaaatgctgggattacaggcctgagccaccacacccggccctcttctgtattttgtaaggatgctttttggattcagagcctaccttmattcactatgctctcatcttaatctacaggtacatccgcaaagaccttctttccaaatgaggtcatgttgtgaggctctgagtggacctgaattttgggg

SEQ ID NO: 21366 - DNA, 201 bp, Homo sapiens
cacgatttcagctcaccgcgacctccacctcctgggttcaagtgattctcctgcctcagcctcccaggtagctgggattacaggcatgcgccaccatgccyggctacttttgtatttttaatagagacagacacttttttgttagacttaaactttaatcatgaaatgttaaagctgaaagaatttcttgtcgttatctgt

SEQ ID NO: 21367 - DNA, 201 bp, Homo sapiens
tactacgactgcttttctttcttttgagacggagttttgctcttgctgcccaggctggagtgcagtggcacgatttcagctcaccgcgacctccacctccygggttcaagtgattctcctgcctcagcctcccaggtagctgggattacaggcatgcgccaccatgcccggctacttttgtatttttaatagagacagaca

SEQ ID NO: 21368 - DNA, 201 bp, Homo sapiens
tgtaggtggaacctagccttgaaaacctttgtctatttttattttgtttgagacggagtctcgccctgtcatccaggctggagtgcagcagcacaatctcmgctcactgcaacttccgcctccagggttcaagtgattctcctgcctcagtctcctgagtagctgggactacaggcgcgtgccaccacccccagctaactt

SEQ ID NO: 21369 - DNA, 201 bp, Homo sapiens
cttcccaggttcaagcgattcttctgcctccacatcccaagtagccagaattacaggtgcctcgccaccaagcctggctaatttttgtatttttagtagaraccgggtttcaccatgttggccaggctggtctcgaactcctaatctcaggtgttctggccgcctcagcctctcaaagtgctgggattacaggcgtgagcc

SEQ ID NO: 21370 - DNA, 201 bp, Homo sapiens
cttacattgcagcctcctggcatctgcagccttttcctgctccctctgcacaccatgtccccacgtgctgtcattcctccctgctttttttttttttttttgagatggaatctcactctgttgcccaggctggagtgcagtggcacgatctcagctcattgcaccttcaacttcccaggttcaagcgattcttctgcctcc

SEQ ID NO: 21371 - DNA, 201 bp, Homo sapiens
aggcaagacgcaaacttatttttctctctcctgagtgcagagtccgggattcatgtgaccgtctcacagggtcagaggcccaggcttcctctgtgctgtcrtttgctctctgtagatgcccttgtccctgtgaacatccatattctgccaacaggaagaggagggcaccccactcaacattaagtggatgttatttgaacc

SEQ ID NO: 21372 - DNA, 201 bp, Homo sapiens
cttgagtaccgtggtaaggagaaaggaacgtgggctttggagccagccacaccgggttttgaagccttgcctgaaccccagctatgttcctctgtcctcaktaccttcatctataaagtggggatgatctcacctgtcttggagggctgacttgaggattgagggtatttgagaatgtgatcagcctgtcaggcatagagt

SEQ ID NO: 21373 - DNA, 201 bp, Homo sapiens
ctccaggatctccctgggtgactggatggatgacaaagccgtcggcagcttgggaccctggtgaggggcaggcacctgcagggggcattaatcaccccagygtggggcaggcatgagcaacctctatctgtgggcccccagggccatccaggaagtttggaaacgggtctgaggctcaccaggtctggctcagagcccagg

SEQ ID NO: 21374 - DNA, 201 bp, Homo sapiens
ccttacattgcagcctcctggcatctgcagccttttcctgctccctctgcacaccatgtccccacgtgctgtcattcctccctgctttttttttttttttttgagatggaatctcactctgttgcccaggctggagtgcagtggcacgatctcagctcattgcaccttcaacttcccaggttcaagcgattcttctgcctc

SEQ ID NO: 21375 - DNA, 201 bp, Homo sapiens
gttgagaagccagccttgagtaccgtggtaaggagaaaggaacgtgggctttggagccagccacaccgggttttgaagccttgcctgaaccccagctatgytcctctgtcctcagtaccttcatctataaagtggggatgatctcacctgtcttggagggctgacttgaggattgagggtatttgagaatgtgatcagcct

SEQ ID NO: 21376 - DNA, 201 bp, Homo sapiens
attggattggcacaagatagaactgtaagacctgcactttgggaggccaaggcgggtggctcacctgaggtcagtagttcaagaccagcctggccaacatrgtgaaatcccatctctactaaaaatacaaaaaaatagctggatgtggtggtgggcgcctgtcatcccagctactcgggaggctgaggcaggagaatcgca

SEQ ID NO: 21377 - DNA, 201 bp, Homo sapiens
cccatctctactaaaaatacaaaaaaatagctggatgtggtggtgggcgcctgtcatcccagctactcgggaggctgaggcaggagaatcgcatgaacccrggaggcagaggttgcagtgagccaagatcacaccattgcactccagcctgggcggtaagaacgaaactctgtctcaaaaaaaagaacagatgacagatga

SEQ ID NO: 21378 - DNA, 201 bp, Homo sapiens
tcaaggtcgctgccttgcttggggttgacaaggagcagggtcttacgtggcccactgctttacaggcacattggattggcacaagatagaactgtaagacctgcactttgggaggccaaggcgggtggctcacctgaggtcagtagttcaagaccagcctggccaacatggtgaaatcccatctctactaaaaatacaaaa

SEQ ID NO: 21379 - DNA, 201 bp, Homo sapiens
ctactcgggaggctgaggcaggagaatcgcatgaacccaggaggcagaggttgcagtgagccaagatcacaccattgcactccagcctgggcggtaagaaygaaactctgtctcaaaaaaaagaacagatgacagatgagggcagactgtctccagagtcaaaatgcccttgtaggttcaatgggatttttttgccatctg

SEQ ID NO: 21380 - DNA, 201 bp, Homo sapiens
ccctcaaggtcgctgccttgcttggggttgacaaggagcagggtcttacgtggcccactgctttacaggcacattggattggcacaagatagaactgtaagacctgcactttgggaggccaaggcgggtggctcacctgaggtcagtagttcaagaccagcctggccaacatggtgaaatcccatctctactaaaaataca

SEQ ID NO: 21381 - DNA, 201 bp, Homo sapiens
cgggaggctgaggcaggagaatcgcatgaacccaggaggcagaggttgcagtgagccaagatcacaccattgcactccagcctgggcggtaagaacgaaaytctgtctcaaaaaaaagaacagatgacagatgagggcagactgtctccagagtcaaaatgcccttgtaggttcaatgggatttttttgccatctgaccgt

SEQ ID NO: 21382 - DNA, 201 bp, Homo sapiens
tcctctaaatgatttccttttccttgtaaattttaccataaagttgcagttcccaaacattcttagttcacagcacccttgatgtcttagtaatttttttmtgatgctcctaggccaataccttatcagttctattaagtagttatgtccaaacaactattagatactatacatacattggaaaaaaagtaatatttgtgc

SEQ ID NO: 21383 - DNA, 201 bp, Homo sapiens
gaggcaggagaatcgcatgaacccaggaggcagaggttgcagtgagccaagatcacaccattgcactccagcctgggcggtaagaacgaaactctgtctcraaaaaaagaacagatgacagatgagggcagactgtctccagagtcaaaatgcccttgtaggttcaatgggatttttttgccatctgaccgttctgtctat

SEQ ID NO: 21384 - DNA, 201 bp, Homo sapiens; identical to SEQ ID NO: 6552

SEQ ID NO: 21385 - DNA, 201 bp, Homo sapiens
cagagtgaggacgaggacagagaagccaagaggaagaaggaggaggaaggtgagcccccagaaggagagaagtgtgtgtgtgtgtgtgtgtgtgtgtgtgragccaagaggaaggaggaggaggaaggtgagcccccagaaggagaggggtgtgtgtgtgtgtgtgtgtgtgtgtgtgtgtgtgtgaagccaagaggaagg

SEQ ID NO: 21386 - DNA, 201 bp, Homo sapiens
gaagtgagctcatgcatttgggtattggcaagggtgtcccgaggaggcgtgaggaagcaagggtgcagacgggcagcatggtatagcctgcaccactgtcrctcttgcgtctcttttccttccctagggttccttacctggctgtggcccggacgtttgagaagatcgaggaggtgtctgctcggtaactaatgaggactg

SEQ ID NO: 21387 - DNA, 201 bp, Homo sapiens
ggctgagcctctgacctcccgcttcctccctgcagcttggaactggcttcagtgacgaggagctggaggagcatcaccagagcctcaaggtgagccatggyggctgcgcctcagcctccacccctctcccccctgcccctgacagcacagtccttccatgcagggctcttggcttccaccatcttggggctccaggtgtgg

SEQ ID NO: 21388 - DNA, 201 bp, Homo sapiens
ccttctcccagctgaagaaggactaccttgatggcgtgggtgacaccctggacctggtggtgatcggcgcctacctgggccgggggaagcgggccggccgrtacgggggcttcctgctggcctcctacgacgaggacagtgaggagctgcaggccatatgcaaggtcctggggaactggggctgatggcagaagcaggagg

SEQ ID NO: 21389 - DNA, 201 bp, Homo sapiens
caccttgggcgctcccccttctcatctcttgcctccccttctcccagctgaagaaggactaccttgatggcgtgggtgacaccctggacctggtggtgatyggcgcctacctgggccgggggaagcgggccggccggtacgggggcttcctgctggcctcctacgacgaggacagtgaggagctgcaggccatatgcaagg

SEQ ID NO: 21390 - DNA, 201 bp, Homo sapiens
gaccccggcctcccagcctgtccccagtcctggaccgtttgaccagaatcctgcctgctccggcgcttgtgagccagggcttcccaaggaccacgcttctrtgtctccctcagactcctgcgaggggctgatggtgaagaccctggatgttgatgccacctacgagatcgccaagagatcgcacaactggctcaaggtgat

SEQ ID NO: 21391 - DNA, 201 bp, Homo sapiens
gtttggaaacgggtctgaggctcaccaggtctggctcagagcccagggttcgggctggtcagtgtaggagggatgaccacccactggtgggttctcatccrcctggggagaggatgtgctgggagcactggagctggcttagggccatgggcaccaacatttagggaagtcgggggtttcaggctttcatgagaggacaga

SEQ ID NO: 21392 - DNA, 201 bp, Homo sapiens
gaaaagaggtgacacacagtatctggtgacaagggtgtgttggttctgataggttgagagctgcttgtcacagctgtcaccgtgacttgaggctccatctscccagctcttacacccaggcgcccatgggacccagctctggacagtaagtggggccagagcacatcccacgtgtgtaagctggtggctccaaaacaagcc

SEQ ID NO: 21393 - DNA, 201 bp, Homo sapiens
ctcactggcagtgctgtgagtggggcgggccgctcatcccggaccccagacatcttggggacctgaggccacgcgtgtgtcaggaaggcttctgggtagaycatcagctgggtcgcatcagtccttctcatggggtgcacagcttcctctcctccttcctgcacccaagcctaggggagtctcctcttcagagtctagcag

SEQ ID NO: 21394 - DNA, 201 bp, Homo sapiens
tcaagattttctcactcattcactcaagatgtgtttcgggagcactgacgtcataccagacccagcacacacggggtcggttaagaatactctgagctgcrggtaacagaaaacccaactacattggcttggacaaagaaggatctgtttttctcacaaaagaagttgcagatgctggctttcctgcccaacaatccatgg

SEQ ID NO: 21395 - DNA, 201 bp, Homo sapiens
agggggactgtggttggagggaccagaaggacaggagctcagccagagaaaatgcagaggtcaggtggatcggagagatggtggagagaggctgtgaaacrgggttgaggagaaggctgagagggaggagagcctgatggggacagatttgcaggggtgtgggagagaacacaggggcagcagttcaggtgagggaggacc

SEQ ID NO: 21396 - DNA, 201 bp, Homo sapiens
ttatagcgaggaccccctactcattcacagaggttccctgcagagcgtcccaccccagtgatgcccagtgcatagcactgccccaccctggtccttctcarcagcatgttagcatcgctggtccctgccagcccccttctctgtccccatttcctcttctctccttgtcctcctcacccccagcactcgcccctgtgtatt

SEQ ID NO: 21397 - DNA, 201 bp, Homo sapiens
tgtttcgggagcactgacgtcataccagacccagcacacacggggtcggttaagaatactctgagctgcaggtaacagaaaacccaactacattggcttgsacaaagaaggatctgtttttctcacaaaagaagttgcagatgctggctttcctgcccaacaatccatggcagctggggcctcttccactgtctcatgcct

SEQ ID NO: 21398 - DNA, 201 bp, Homo sapiens
cacttccctagtgaccttgtcccgcctgtggctttaaatcccatccgcgccctgatgacaccggcccagatgtctcccctgagtgtggtcatgctcgttcwtccaccgctttcctggctccacgtgcatgtttgctgacttcctacagccagcgtggctgggggcacgttccccaagccatttctaccaagtgggtgagcg

SEQ ID NO: 21399 - DNA, 201 bp, Homo sapiens
agagcctttctctttgcctgcccctaattaaataggaaataagttatttaagaaagcagggggcacggtgcccatcattctgcctgttagagacagtgacrgagagaggcacagttcagtgcacgtgttaggggagctcctgttccgtgccaagcactgttctttaaatcaattttcttaagatgtaatttccctaaaagt

SEQ ID NO: 21400 - DNA, 201 bp, Homo sapiens
gactgctcacaggtctccccgccccgtcctgccacatctcctgagaacaatgcttccctctctgacacctctcccatggacagttccccatcagggattcygaagcgtcgcacaggtgagaacacacgggcccctgccccttcagtcgcctgcctttctttttctcttttttttttttttttttttttttgagacatagtc

SEQ ID NO: 21401 - DNA, 201 bp, Homo sapiens
  misc_feature (1)...(201): n = A,T,C or G, or insertion/deletion polymorphism (see Tables 1-2)
tgccggccaccgcttgttaaaccccaagttcataccaaaggccatgcacagccctgcagtggcactatctgtcttggccatccatgccctgtgtgagcatnagaatcagctgaagagctgaaaaatatcctgaggtctctttctcccccccaacccttgtccccattttggtacagatgtaggcctggggctggggagtcc

SEQ ID NO: 21402 - DNA, 201 bp, Homo sapiens
cccctgcccaccacactctgctgcctcattgtaatgccggccaccgcttgttaaaccccaagttcataccaaaggccatgcacagccctgcagtggcactrtctgtcttggccatccatgccctgtgtgagcatcagaatcagctgaagagctgaaaaatatcctgaggtctctttctcccccccaacccttgtccccatt

SEQ ID NO: 21403 - DNA, 201 bp, Homo sapiens
taccctgaggcttctggggagctaggaagagttttgggcagaagagaggcagagatcatttagtcctgggcagtgtttaaaatattcatctggccaggcaygatggctcacgcctgtaatcccaacactttgggaggccaaggcgggtggatcacgaggtcagaagttcgagagcagccaggccaacatagtgaaacctca

SEQ ID NO: 21404 - DNA, 201 bp, Homo sapiens
tgtcaccctggctgctatggggaagctggattggaggggatcggtgcaggacagggaagcccagtaggcgaggctgagcagggagttggtgggaagtggayggcttaggaaatcatcaggttcactgaggaactgaatgtgggtgacaggaggagggagatgacaagagctcctaggtttccagcttgtgagaccaaatat

SEQ ID NO: 21405 - DNA, 201 bp, Homo sapiens
tgctccaaatcctcacaacactgctgggagtagattctgttgttatcctggtttcctgggtgagaaaagtaaagcggggaggtgggacagtattgaggacyggctaggaatcccagctccacctctctcagctgtgtgaccttgaggaagtgacttagcctttctgtgtctctcttctgaggatgtgaaacacttagccca

SEQ ID NO: 21406 - DNA, 201 bp, Homo sapiens
gaactgtgccatgtcactgccattagctgcagaaaagtctaggagagcaaatatctggtgaaggggaatgaggttgtcggaattagctgagagccgttaasgatccagcacctggagccagcagcatggccgccctcacagatgggcagccagttaggtggcgagagggagaccggtagatgaatgctgtcggcctcaggc

SEQ ID NO: 21407 - DNA, 201 bp, Homo sapiens
aaatggtgtcgggccctcttgccagtgactagccccatgctttaagctctcagaatccttctgacatcagggttcttccctctcaaggctttccacgaacsctgtcactagttgtgacccgcacatgtcctgttcgcctcacatttagggcttattgtctttattctcacaaagatgtctcatctctcttctccctgccgg

SEQ ID NO: 21408 - DNA, 201 bp, Homo sapiens
ctccctggacaccaaggacatcgagcagatcgccgagttcctggagcagtcagtgaaaggtgagggtgctcacttttctctcctgaggtctgcagcttgcrctgaccccggcctcccagcctgtccccagtcctggaccgtttgaccagaatcctgcctgctccggcgcttgtgagccagggcttcccaaggaccacgctt

SEQ ID NO: 21409 - DNA, 201 bp, Homo sapiens
ggctggagtgcagtggcacgatctcagctcattgcaccttcaacttcccaggttcaagcgattcttctgcctccacatcccaagtagccagaattacaggygcctcgccaccaagcctggctaatttttgtatttttagtagagaccgggtttcaccatgttggccaggctggtctcgaactcctaatctcaggtgttctg

SEQ ID NO: 21410 - DNA, 201 bp, Homo sapiens
aaagcatctgtgtgcacctgcctctttgttagtgcatcttgagagctgcagaaggaaaagggaatttatctccccgtgtttgtctttccacctcatcttcyacctctctcaggccctgggtctctcccttcacttttcagattaaactcccatcggtcacatccttcatcctggacaccgaagccgtggcttgggaccggg

SEQ ID NO: 21411 - DNA, 201 bp, Homo sapiens
attaaactcccatcggtcacatccttcatcctggacaccgaagccgtggcttgggaccgggaaaagaagcagatccagccattccaagtgctcaccaccckcaaacgcaaggtagcatcacccgctccactgcctgccaaggccccgtacttcctcatcttccacccagtcctggctgtgggtcctgcccagtgcccagaa

SEQ ID NO: 21412 - DNA, 201 bp, Homo sapiens
tgagagggaggagagcctgatggggacagatttgcaggggtgtgggagagaacacaggggcagcagttcaggtgagggaggaccaggcatgtgctgggacrgggggtgtggggtgcagggaaggggagggctggggaaagatgctggaggcagagacagcaggatttgggggctgagatggaaggttggggcttagagagg

SEQ ID NO: 21413 - DNA, 201 bp, Homo sapiens
ctcttcattttggtaaccgctttattgagatataattcacaattatacagtttgcccatttaaagtgtacaattttgcccatttaaaatgtacaagtcagyggttttcagtgtatttaaagtgtatttcagtgtatttaaagtgcccatttaaagtgtacaagtcagtggttttcagtgtatgcgctgagttgtgcagtta

SEQ ID NO: 21414 - DNA, 201 bp, Homo sapiens
gaggcccatctaggccagtgtggcacagtgcggggtttattgggaggagatcaggttgcgtttggctgcaaatgacagagcactcagtcctgcgtggtgtragcccatatgattttttctcacatctagaggtgggcaccccagcaccgacttggctgagcactgatgtccccctgaaccaagcttatcgctacctctatc

SEQ ID NO: 21415 - DNA, 201 bp, Homo sapiens
agcaagggaggtggccagggaaggtacaggtgtgcagctgtgtcccagggatgacccggggacccaggttcctgtgtccctctgccctccaaaggttgtcrccccaatgtctgtgatcaaatgtggctcacttccctgttctaattgtgggaggagggacgcagaggagggaggggaggcaaccagattccttgcaaggat

SEQ ID NO: 21416 - DNA, 201 bp, Homo sapiens
aagtctaggagagcaaatatctggtgaaggggaatgaggttgtcggaattagctgagagccgttaaggatccagcacctggagccagcagcatggccgccytcacagatgggcagccagttaggtggcgagagggagaccggtagatgaatgctgtcggcctcaggcacagtgccccgtctcaccttcctgcactcacgaa

SEQ ID NO: 21417 - DNA, 201 bp, Homo sapiens
ccctaaccttcctagcggcatggctacagatgaatgactcagcctctctgtgtgtcagtttcttgatctacagtaaggagctaacagtggcaggtgctttrtctgttagggtgagggctaaacagtgggataggggtgtggaactcagtagttagtacatggaagctctcaaaaaaaattagctgcaatcatcaatatccc

SEQ ID NO: 21418 - DNA, 201 bp, Homo sapiens
agtggcaggtgctttgtctgttagggtgagggctaaacagtgggataggggtgtggaactcagtagttagtacatggaagctctcaaaaaaaattagctgyaatcatcaatatcccagataatcttttttttttttttttttgagatggagtctcactctgttgcccaggctggagtgcagtggcatgatctcagctcact

SEQ ID NO: 21419 - DNA, 201 bp, Homo sapiens
gggaccgatcgaacaaaagagaaaagcaattcaaagccacaagacggattagtcagtgttgacatgtggagacaactgctttgtcctttgtttaaaaacaytcagatcacctccttcctctctgacacacactcttgcaaggtccagctggaactgatttcaaagcaaaacacaaaactgtaaatgtgctggaaaaactca

SEQ ID NO: 21420 - DNA, 201 bp, Homo sapiens
gatgacaccggcccagatgtctcccctgagtgtggtcatgctcgttcatccaccgctttcctggctccacgtgcatgtttgctgacttcctacagccagcrtggctgggggcacgttccccaagccatttctaccaagtgggtgagcgttagacacagggaggtgcagggactcgccacaagcacacacagctggagaaaa

SEQ ID NO: 21421 - DNA, 201 bp, Homo sapiens
ataaaactggatcttcctcttgaaggtttcaggaagtcagtgggggttccgtgccgggagtcacaggttgtcattgtgcgaagctcctggggtttcccctygagtggaggacgggtgtgttgagggccagcgagcaggagcctgtcatcagtaagagttgatggatgtttgagtggagaggggcagtgaggggtggacaag

SEQ ID NO: 21422 - DNA, 201 bp, Homo sapiens
ataggttgttaagcaattaattgcttcactgtaattttgttaattatttgaagagatgtctgggctgattcccacgacatctaacatgcacacaggaggcygcactgaagactggctgaatggatgattggatgcgtgggtggataaatatcctataaagtaatgaggtcacccccccatctctgccatgctcaaaaccca

SEQ ID NO: 21423 - DNA, 201 bp, Homo sapiens
gtgaggctacagagggggactgcaggctcggaggtgaaaggagggagggactggcagctggaatcatcacaaatgccctgaccatccttggatgagaaaarcatgagcaggaggcccagcccctaaagagtgggaagggacaccatttcctttcacaggccagcttctgtcccttggtagtgctgtctagagaaggcccct

SEQ ID NO: 21424 - DNA, 201 bp, Homo sapiens
tagagagccggccgccctgccccagccctcgtgatgtgcttagtgtgctggggctgtgggacactgaataggttgttaagcaattaattgcttcactgtarttttgttaattatttgaagagatgtctgggctgattcccacgacatctaacatgcacacaggaggccgcactgaagactggctgaatggatgattggatg

SEQ ID NO: 21425 - DNA, 201 bp, Homo sapiens
gccatggtggatgctgggaagggcaagacagcagaggccagaaagacgtggctggaggagcaaggcatgatcctgaagcagacgttctggtgagagctggrcagtgggtggagttgccaggggctgtgggcagagtgccagggtgggggtggagccagaggagcagtgggtggggccagtgaagtgacggacaggcatcac

SEQ ID NO: 21426 - DNA, 201 bp, Homo sapiens
ttgttctcacccgccaccccagcgaggttcccgacctggaccgaattatccccgtgctgctggagcacggcctggaacgtctcccggagcactgcaagctsagcccaggtacaggccccaggggcgctcaccagcctggcagcagccctgctccctcctgagtcggcgtgagggtggccatcgtaggcgcccctctcagaa

SEQ ID NO: 21427 - DNA, 201 bp, Homo sapiens
ggcgcgtctactctgccttaaaattcactgaacaccccttctttgccagccctgggcggcccacgaggatgaaccatagagagccggccgccctgccccakccctcgtgatgtgcttagtgtgctggggctgtgggacactgaataggttgttaagcaattaattgcttcactgtaattttgttaattatttgaagagatg

SEQ ID NO: 21428 - DNA, 201 bp, Homo sapiens
cttatcagttaagttaaagggcttatttgaaattctctgttatgtgctgagatggaaatggtgttagaagttataggatgcggccgggcgcggtggcttaygcctgtaatcccagcacattgggaggccaagcagatcacaaggtcaggagatcgagaccatcctggctaacacggtgataccccatctctactaaaaata

SEQ ID NO: 21429 - DNA, 201 bp, Homo sapiens
tcggcctcccaaaatgctgggattacaggcatgagccaccgtgcccggccccatttgttcttatttaaacctagaaacccttcccatgtccagtctcttcycaggggccatccttggggttccttctggaagttcccttcagacttacttctagtccctcctcagtccactgaggagcccctccccagcagtgagggcccc

SEQ ID NO: 21430 - DNA, 201 bp, Homo sapiens
agagcctgggggatctttctaacacccagagttgactctgcccctctagggttccccagagccgtcaggagaaaatctaagcccatttggccactggctgycacctccctctctggcctcacttcctacctctctgttcctctggctctgaactcaccagattttttatttttgagacagagtcttgctctgtcgcctagc

SEQ ID NO: 21431 - DNA, 201 bp, Homo sapiens
gagaatcgcttgaacctgggaggcagaagttgcagtgagccgagatcacaccattgcactctagcctgggcaacagagcgagagtctgtctaaaaaaaaaagatttaaaaagtgcatagttaatatttgttgaataaaacttgggatgtatcatatcttgcaggtgcgttagggcagaaaaattagtgttgcctcctttgt

SEQ ID NO: 21432 - DNA, 201 bp, Homo sapiens
caggggccatccttggggttccttctggaagttcccttcagacttacttctagtccctcctcagtccactgaggagcccctccccagcagtgagggccccrccttgggcgctcccccttctcatctcttgcctccccttctcccagctgaagaaggactaccttgatggcgtgggtgacaccctggacctggtggtgatcg

SEQ ID NO: 21433 - DNA, 201 bp, Homo sapiens
aaagagccagagagtaaatattttaggctttatgggacacatttggcccctgttgcaaaaccattcttagatcccagaacctgtagaaacggtccagggtyggagtttgctgaccgtggccccagccaccctctgaccctgcctccagtctttcatcctcagtctgatccccgtagagcctgggggatctttctaacaccc

SEQ ID NO: 21434 - DNA, 201 bp, Homo sapiens
tgcccttgtaggttcaatgggatttttttgccatctgaccgttctgtctatcgtcagaagaggagaccccgaaagaaagcctcacagaggctgaagtggcmacagagaaggaaggagaagacggggaccagcccaccacgcctcccaagcccctaaagacctccagtgagtttctggtcctctcctccgccctgccccacc

SEQ ID NO: 21435 - DNA, 201 bp, Homo sapiens
gtgggcgcctgtcatcccagctactcgggaggctgaggcaggagaatcgcatgaacccaggaggcagaggttgcagtgagccaagatcacaccattgcacyccagcctgggcggtaagaacgaaactctgtctcaaaaaaaagaacagatgacagatgagggcagactgtctccagagtcaaaatgcccttgtaggttcaa

SEQ ID NO: 21436 - DNA, 201 bp, Homo sapiens
ttataaagagaggtttcctggactcacagttccacacggctggggaggcctcacagtcatggcagaaggcgaaagaggagcaaaggcacatcttacatggygccaggcaagagagcgtgtgcaggggaactgccctttataaagccgtcagatctcgtgagacttcctcactatcacgagaacagcacgggaaaaacctgc

SEQ ID NO: 21437 - DNA, 201 bp, Homo sapiens; identical to SEQ ID NO: 6607

SEQ ID NO: 21438 - DNA, 201 bp, Homo sapiens
cacccagtaggggtctcgtgcctgttcgaggagtcccctatcaaagagcctttctctttgcctgcccctaattaaataggaaataagttatttaagaaagyagggggcacggtgcccatcattctgcctgttagagacagtgacggagagaggcacagttcagtgcacgtgttaggggagctcctgttccgtgccaagcac

SEQ ID NO: 21439 - DNA, 201 bp, Homo sapiens
aggatggtgacaaagatcaggaaggtggcaaacagtgaagggtcagtgaccccaggagaggtatagaaagacgctggcagcggccaggcacagtggctcaygcctgtaatcccagcacttgggagcctgaagcaggcagatcacttgaggtcaggagtttgagaccagcctggccaacatggtgaaaccctgtctctacta

SEQ ID NO: 21440 - DNA, 201 bp, Homo sapiens
gtgttctttttttttttttttttttttttttttgagacagagtctcactctgtcatccaggctggagtgcattggcatgatcttggctcactgtaacctcyacctcctggcttcaagtgattctcctgcctcagcctcccaagtagctgggactacaggcgcccgctaccgtgcccggctaattttttgtatttttagtag

SEQ ID NO: 21441 - DNA, 201 bp, Homo sapiens
tctaggccagtgtggcacagtgcggggtttattgggaggagatcaggttgcgtttggctgcaaatgacagagcactcagtcctgcgtggtgtaagcccatrtgattttttctcacatctagaggtgggcaccccagcaccgacttggctgagcactgatgtccccctgaaccaagcttatcgctacctctatcccctgctg

SEQ ID NO: 21442 - DNA, 201 bp, Homo sapiens
tggacacctcccacccacaacccctcccccgccgtggactgcagctgggagtcactgtccagcactgggttccatggccaccctagtgcaacaaagcctcrgaaagccagagtctaactctgcagcctctccagccaggaacgcggggaggaggagtcaggacgagtttggagggggccagcctgtggataggccccaagc

SEQ ID NO: 21443 - DNA, 201 bp, Homo sapiens
gctttcttccatgctttgctcagatatcacttcctcagcgaaactttcctcaccacctatgttagcttcccatttgctgccataacaattgaccacaaacrcagtggcttaaaacagtgtcagtttattgtcttacagtttgggagtcgtgagtctcaaatgggttgcactgggctaaactcaaggtgtcagcaggtctgc

SEQ ID NO: 21444 - DNA, 201 bp, Homo sapiens
tactctagcctgggtgacagtaagactccatctcaaaaaaataaaaataaaaaatcaaatatttccttgtgtccctggccaagcaaggccccctcctctgyccaacaccatgcatccaccagaggcaaccccaggtctgctttttggtcgccacaggttggttttacctgttctagagcttcctgttggtggtataatatg

SEQ ID NO: 21445 - DNA, 201 bp, Homo sapiens
ctgcagcttggaactggcttcagtgacgaggagctggaggagcatcaccagagcctcaaggtgagccatggcggctgcgcctcagcctccacccctctccyccctgcccctgacagcacagtccttccatgcagggctcttggcttccaccatcttggggctccaggtgtgggcaggagggcagcaggcagtggagctggc

SEQ ID NO: 21446 - DNA, 201 bp, Homo sapiens
cagagagtcctgcagctggctctgtaaattatatgtggagatccgggctccacaggaaaggaccagcattctgtgagcctatgtaacaaacaggcctggcyggtgacagtggctcctgtaatcccagcactttgggagggcaaggcgggtgaatcacttgaggttaggagttcgagaccagcctggccaacatggtgaaac

SEQ ID NO: 21447 - DNA, 201 bp, Homo sapiens
aggcgggtgaatcacttgaggttaggagttcgagaccagcctggccaacatggtgaaaccctgactactaaaaatacagaaattagctggatgtggtggcrtgctcttgtagtcccagctacttgggaggctgaggcaggagaatcacttgaacgtgggaggcagaggctgcactgagcggagattgcaccactgcacgcc

SEQ ID NO: 21448 - DNA, 201 bp, Homo sapiens
acttccctggttttctgtggatactgcgtagaccagagtggggtgggggccatgagtgtacacagctttagatggcaggagcaagtgctgggcctgtggcyggctgagcctctgacctcccgcttcctccctgcagcttggaactggcttcagtgacgaggagctggaggagcatcaccagagcctcaaggtgagccatgg

SEQ ID NO: 21449 - DNA, 201 bp, Homo sapiens
gagggaaaagaaggcttgccagtggaggagacagacaggggcaggggttctagagggaacggcacatgcaaaggcccagtagtggaagaggcattgcccayttatttgagaaacagagaggctcacgtgctggggtgaagagaggctcagggggccaggtgaggcgagggacgacccaggctgacccgggagagtcccccc

SEQ ID NO: 21450 - DNA, 201 bp, Homo sapiens
tgtacacagctttagatggcaggagcaagtgctgggcctgtggccggctgagcctctgacctcccgcttcctccctgcagcttggaactggcttcagtgaygaggagctggaggagcatcaccagagcctcaaggtgagccatggcggctgcgcctcagcctccacccctctcccccctgcccctgacagcacagtccttc

SEQ ID NO: 21451 - DNA, 201 bp, Homo sapiens
gacaagagctcctaggtttccagcttgtgagaccaaatattacattctcagagacattagtttctgtctcctcttggtggggaataaaagaaaagcatctrtgtgcacctgcctctttgttagtgcatcttgagagctgcagaaggaaaagggaatttatctccccgtgtttgtctttccacctcatcttccacctctctc

SEQ ID NO: 21452 - DNA, 201 bp, Homo sapiens
agtatttacaaaggactgattacgtgttagctactggattttaggtgcctgagatctggtaggaaacaaatcagacaaaaattcctctttatagaacttargttttttgggttttttgttttttgtttcttgttttttttttaaagacagggtcttgctctgttacccaggctggagtgcagtggtgctcctgggctcggg

SEQ ID NO: 21453 - DNA, 201 bp, Homo sapiens
atgtgttgtgtctcttctgtcctggcaagtgtggggccttctcacctggggataggtaagcaggcaaagtgggtgggagccacagggctcggggcagttasaggaagtggacccctgaggagaccagcctggccaacatggtgaaaccccatctctactaaaaccacaaaaatgagccagtgtggtggcgtgtgcctgtag

SEQ ID NO: 21454 - DNA, 201 bp, Homo sapiens
gcttccaccatcttggggctccaggtgtgggcaggagggcagcaggcagtggagctggctttggagtccagcatctccaggttcatgtctcagcactgccrgctactagctggtgaccctgctcaagcagcctcacctccccaagccctgtgcctcattcacaccaggggttagccaaaggacacagcaggtgccatagct

SEQ ID NO: 21455 - DNA, 201 bp, Homo sapiens
tgtttttttcccttcctccctctccccagccctccaacacttggccttgactttgagattccagaccctctgttcctctcttcctctgctcactgcaggcsctggtgctgcccagcccacgcccttacgtgcggatagatggcgctgtgattcccgaccactggctggaccccagcgctgtgtgggaggtgaagtgcgctg

SEQ ID NO: 21456 - DNA, 201 bp, Homo sapiens
gctgtggattttgagagtcaggggaggggtgtgtgtgtgagggggtggcttactccggagtctgggattcatcccgtcatttctttcaataaataattatyggatagctactttgtgacagggtctgtgctgggctctgggggcaaagctgtcatgggtgtcacctgcatagcatgtagccatgtagccatggcctaggaa

SEQ ID NO: 21457 - DNA, 201 bp, Homo sapiens
caatctcagctcactgcaagctccccacctcccggattcacgccattctcctgcctcagcttcctgagtagctgggactacaggcgcccgccaccacaccyggctaatttctttttgtatttttagtagaggcggggtttcaccgtgttagccaggatagtctccatctcctgacctcgtgatccacccgcctcggcctcc

SEQ ID NO: 21458 - DNA, 201 bp, Homo sapiens
tgatttaatactgaaaactgaaatacctcgaactagtagttcacacactggccagcaggtgtcgctgggtttcctttgaaaaatctaaaatatcttgcagygcccagtgagttccctgcatgttggtgaacccaccgaaaacagccataaagatctgatcgattgatcatctggggcctgcatgagattacaccaattgca

SEQ ID NO: 21459 - DNA, 201 bp, Homo sapiens
tcccaggcccctcctgctgctcctctcttcccccgcccatcacatctgcagccgcatccacagctcctcctcagctcgctccatcctggcttcccacaccyaccaggtgcacttccacctctgggccactaccttctttcccagcctaaaactctctttcccagatacacgcctggctcagtcccctgctttcttccatgc

SEQ ID NO: 21460 - DNA, 201 bp, Homo sapiens
tttttttttttttttttttttttttgagacagagtctcactctgtcatccaggctggagtgcattggcatgatcttggctcactgtaacctccacctcctrgcttcaagtgattctcctgcctcagcctcccaagtagctgggactacaggcgcccgctaccgtgcccggctaattttttgtatttttagtagagacgagg

SEQ ID NO: 21461 - DNA, 201 bp, Homo sapiens
aatgctccagagtgacccccgagatgcgaggcagctggggtatttatacaccaactcctgccgatcgtggggtgagggcctctcctggggctagtttattycctgccacttccagacttctgaggttccggggaagctgtctggaacacttggaggcagttaagatctgaggggagcagtggggagctcaggggacctgct

SEQ ID NO: 21462 - DNA, 201 bp, Homo sapiens
ttcaaggtccctctctttccaactccacattggcgtgaggtggatcttcctcaggtcctgcaacgagaagagtgtgtcgtagaagcacgcaggagaatccrgcctctgttaagccagatattagaggatttgcaaaagtgtaaaataatgcctctagtctcaccactttctcaaaacttgggttatgtttcatcaaaatat

SEQ ID NO: 21463 - DNA, 201 bp, Homo sapiens
tggctgagggcatgctgggagctccaggtggacgctgaggttggccctgggggtgtgtcaggggatcttgttcagagggagcaacattgagctatgtcccraacctcacatgctgaggcctggaggggtgacacagcttggtgtgtctggaaacaccccagtttagcagtgatataaaagaaggtggagtatgtggtgtgg

SEQ ID NO: 21464 - DNA, 201 bp, Homo sapiens
tcacgcctgtaatcagagcactttgggaggtgggaggatcgcttgagcccagtagttcaagaccagcctgggcaatatagaaaagaccttgtgtctattcmaaaaaaaaaaaaaaattaatattatttgggtgagcatattggatttatttttttaatttctcattttaaatttctaataggtgtaactataatattatgt

SEQ ID NO: 21465 - DNA, 201 bp, Homo sapiens
ggtgtccaacttgagatgtgcagtgagttcattggattttgaagacctagcatgaaaacagaatgttggaatcatactgttttagatgtattgagcaaaayagactcttcaaaccaagttcaacctggttttttccccctttttattaacgtggctgcaagaaagtttaaggttacatacgtggcttgccagatctttcca

SEQ ID NO: 21466 - DNA, 201 bp, Homo sapiens
ctttccaaagcgctgagattacaggcatgagccactgcagtagcctacatttctaattttagagcttctagtagccatattaaaaggtaagaagaaacagrtaaaatcatattttctttaatccaatgtctaagatattatcctttcaatgtgtgatgaatataagaaattattaacatggaattttacactcttttcttg

SEQ ID NO: 21467 - DNA, 201 bp, Homo sapiens
gaactgatttcaaagcaaaacacaaaactgtaaatgtgctggaaaaactcagtgaaaacttttggaattctaaggaaaggaggactttttttttttttttwaaattatcttggggatgaggctggatgcagtggctcacgcctgtaatcccaacactttgggaggctgaggtgggtggatctcttgtgatgtgcacctgta

SEQ ID NO: 21468 - DNA, 201 bp, Homo sapiens
tctcaaggctttccacgaaccctgtcactagttgtgacccgcacatgtcctgttcgcctcacatttagggcttattgtctttattctcacaaagatgtctyatctctcttctccctgccggccctgcagtccctggtacgtgagcccctttcccggcgccggcagctgctccgggagaactttgtggagacagagggcgag

SEQ ID NO: 21469 - DNA, 201 bp, Homo sapiens
tccagcacagacctttcctgtctcaggaaatagcactgttgtgcccccagggctgagcttctgcctggcacatggttagcacttagtgaacgtttctgaaygaatgggaaaatgctctccctttggaggagtggccagagtgagttggccacgtctctgtcctgagggaaagacggcggcaaggctgactcctgaggtccc

SEQ ID NO: 21470 - DNA, 201 bp, Homo sapiens
tctcattggccagaactgtgccatgtcactgccattagctgcagaaaagtctaggagagcaaatatctggtgaaggggaatgaggttgtcggaattagctragagccgttaaggatccagcacctggagccagcagcatggccgccctcacagatgggcagccagttaggtggcgagagggagaccggtagatgaatgctg

SEQ ID NO: 21471 - DNA, 201 bp, Homo sapiens
ctgccatgtgcctctggcctcatcatcacaatgtggctgcaggagttccagccctcatggccatgcctgctccacgcaccagggaagagcaaagggggttsgaccctgagtcagcctcagccagtgaacaccttctgctcaagttctgttgctcatcactttgctccatggctcacccctagctgcaaggaattctgggaa

SEQ ID NO: 21472 - DNA, 201 bp, Homo sapiens
atgtgcctctggcctcatcatcacaatgtggctgcaggagttccagccctcatggccatgcctgctccacgcaccagggaagagcaaagggggttggaccytgagtcagcctcagccagtgaacaccttctgctcaagttctgttgctcatcactttgctccatggctcacccctagctgcaaggaattctgggaaatgta

SEQ ID NO: 21473 - DNA, 201 bp, Homo sapiens
ttttgcattatttagaatagatttttaaatgagctattgtcaggacaaaaggcaaaaagaatccttaagactctcaatgcaaaaggggctttccaggtgaygtttatattggtgattattgcccacttgctgcgtatctgccagcatccagcattactgctaatttttagcctttcctattttggtaggtgaaagaagctc

SEQ ID NO: 21474 - DNA, 201 bp, Homo sapiens
gtgtgagccaccgcgcccggccctaattttgtatttgtaatagagatggggtttcactatgttggccaggctggtcttgaactcctgacctcaagtgatcsgcccgcctcggcctcccaaaatgctgggattacaggcctgagccaccacacccggccctcttctgtattttgtaaggatgctttttggattcagagccta

SEQ ID NO: 21475 - DNA, 201 bp, Homo sapiens
gcgggtgcctgtaatcccggctactcaggaggctgaggtacgagaatcacttgaacccaggaggcagagattgcagtgagctgagatcacgctattacacyccagcctgggtgacagagtgagactctgtctcaaaaacaaacaaacaaaattatcatgggtacggctcattctgcttgccttcactatcaaacccgtttc

SEQ ID NO: 21476 - DNA, 201 bp, Homo sapiens
aggactttgggaggtcgaggtgggaggatcgcttaagtccaggagtgagacaccagcgtgtgcaacacggcaaaaccccatctctacaaagatcagtcggrcatggttgcttgcacctgtagtcctagctactcaagaagctgaggtaggagaatcccttgagcccaggaggttgaggctgcagtgcgcattgctccactg

SEQ ID NO: 21477 - DNA, 201 bp, Homo sapiens
tggggtttcactgtgttagccaggaagatcttgatctcctgacctcgtgatccgcccacctccgcctcccaaagtgctgggattacaggtgtgagccaccrcgcccggccctaattttgtatttgtaatagagatggggtttcactatgttggccaggctggtcttgaactcctgacctcaagtgatccgcccgcctcggc

SEQ ID NO: 21478 - DNA, 201 bp, Homo sapiens
tgctgggattacaggcatgaaccatcgtgcctggcctctagggtgtggtcttaactacctcaccagcttatccgaagctacaatcctccagagtcctgacygatgatagtgggagctcatgaaacgtgggctccgctgatgctgctggtgggtgtgttcattttaacagccgttctgggaggtgcctacatgaccccttca

SEQ ID NO: 21479 - DNA, 201 bp, Homo sapiens
ttgaggctgcagtgcgcattgctccactgcactctagcctgggcgacagtgagaccctgtctcaaaaaaaaatagaggttgggaactgtctctagagctgygctgcttaccagctgtgtggccatgggtgagttaatcactctgtgccccagtttccttatccggaaaaggaagttagaaaggtcccttctggccaggcac

SEQ ID NO: 21480 - DNA, 201 bp, Homo sapiens
cagtaagtggggccagagcacatcccacgtgtgtaagctggtggctccaaaacaagccgaagggtctttggtcactgccagagatgttcatgacccgccaraggaaagggtcccttggccttctctgctctgtccacactcacttccctagtgaccttgtcccgcctgtggctttaaatcccatccgcgccctgatgacac

SEQ ID NO: 21481 - DNA, 201 bp, Homo sapiens
cctagtgaccttgtcccgcctgtggctttaaatcccatccgcgccctgatgacaccggcccagatgtctcccctgagtgtggtcatgctcgttcatccacygctttcctggctccacgtgcatgtttgctgacttcctacagccagcgtggctgggggcacgttccccaagccatttctaccaagtgggtgagcgttagac

SEQ ID NO: 21482 - DNA, 201 bp, Homo sapiens
aaattcatccaggccgcgagagaagggagacacgcagccacaactgtcaccctcgacacccccacccgcgctctcccctgaaggtcggcagctggagtccrtccgggctgaggcagccgagaaaggcgacgtggggctggtggccgagaacagccgcagcacccagaggctcatgctgccaccacctccgctcactgcctc

SEQ ID NO: 21483 - DNA, 201 bp, Homo sapiens
ggggatggggtgagggaaggagggcaggtattccaaaatgcagggcagcagcacggctggtggggtggaggtgtggtccctgccttcaccaggcactgacrgctcttcccctgactctccagtccacagccaagaagatagacatcatcaaaggcctctttgtggcctgccgccactcagaagcccggttcatcgctaggt

SEQ ID NO: 21484 - DNA, 201 bp, Homo sapiens
tccccagtctatgctagtgggcaggatcattactgcctggctcagtttcctcatctgtcacatggggctgtgtgatatctggggtcccttccaggctctgmagattcttctggtttttgaggagagggtctacatacatcaaggtcgaggagatcagagaagggaggaggcaagattggggaggtgcagacaagccccctt

SEQ ID NO: 21485 - DNA, 201 bp, Homo sapiens
gatctagacaaggctggtgcttgacacaaggatggtgacaaagatcaggaaggtggcaaacagtgaagggtcagtgaccccaggagaggtatagaaagacrctggcagcggccaggcacagtggctcacgcctgtaatcccagcacttgggagcctgaagcaggcagatcacttgaggtcaggagtttgagaccagcctgg

SEQ ID NO: 21486 - DNA, 201 bp, Homo sapiens
cagaaatagcagctcagagtcatacagggctgggcctcacaggccccagagttggggacttctctgcacccagtaggggtctcgtgcctgttcgaggagtmccctatcaaagagcctttctctttgcctgcccctaattaaataggaaataagttatttaagaaagcagggggcacggtgcccatcattctgcctgttaga

SEQ ID NO: 21487 - DNA, 201 bp, Homo sapiens
ggattggggatggtgagcaatgaggtgagaaggtcctggaaaaccagcttggggaacagcgtctttgtcctaagggggacttggaatgtttgctgtggggkaagaacagggcgagagacccattcgtaatgcggggcagtgtgagcccttgccgtccggtctagcctattgagcgctttagcgtggtgagtgtgacagggg

SEQ ID NO: 21488 - DNA, 201 bp, Homo sapiens
ggcaacaagcaaaggaggaggggagcatgctaggcaaggggaacatagaaattgagaaggcctgggggctgctgagggcctggtgtgctggcgtgtagagygcaggattggggatggtgagcaatgaggtgagaaggtcctggaaaaccagcttggggaacagcgtctttgtcctaagggggacttggaatgtttgctgtg

SEQ ID NO: 21489 - DNA, 201 bp, Homo sapiens
ggaagagttttgggcagaagagaggcagagatcatttagtcctgggcagtgtttaaaatattcatctggccaggcacgatggctcacgcctgtaatcccarcactttgggaggccaaggcgggtggatcacgaggtcagaagttcgagagcagccaggccaacatagtgaaacctcatctctgctacaaaagttagccggg

SEQ ID NO: 21490 - DNA, 201 bp, Homo sapiens
gccatgttagccaggctggtcttgaactcctgacctcaagtgatccacccacctcggcctcccaaagtgctgggatgacaggcgtgagctactgtgcctgrcctatagcctttctcttttacacagttcagtagcacacactctgtgatattctgccctttgtttgaaataacagcataccttagaaactgcccaagagct

SEQ ID NO: 21491 - DNA, 201 bp, Homo sapiens
caaagccaggccttgtggaaacctcccaggcccctcctgctgctcctctcttcccccgcccatcacatctgcagccgcatccacagctcctcctcagctcrctccatcctggcttcccacacccaccaggtgcacttccacctctgggccactaccttctttcccagcctaaaactctctttcccagatacacgcctggct

SEQ ID NO: 21492 - DNA, 201 bp, Homo sapiens
ctgctgggagaacattcccacccgggagtctctggatggatgctccgcacccccagctccctacttccctggttttctgtggatactgcgtagaccagagyggggtgggggccatgagtgtacacagctttagatggcaggagcaagtgctgggcctgtggccggctgagcctctgacctcccgcttcctccctgcagctt

SEQ ID NO: 21493 - DNA, 201 bp, Homo sapiens
acaaccagaaaatgttcattggatgcttgaaaggaagggaaggaaacagcaaagaaaccaaagtgtttgcgggcagtgcccccactctgcctgctgtagtygcccctttacacccccatttccccaccttccagggcggcactgaaggagtggaatggagtggtgtccgagagtgactctccggtgaagaggccagggagg

SEQ ID NO: 21494 - DNA, 201 bp, Homo sapiens
gaggtcaggagttcaagaccagcctggccaacatggtgaaaccccatctctactaaaaacacaaaattagcccagcatggtggcgggtgcctgtaatcccrgctactcaggaggctgaggtacgagaatcacttgaacccaggaggcagagattgcagtgagctgagatcacgctattacaccccagcctgggtgacagag

SEQ ID NO: 21495 - DNA, 201 bp, Homo sapiens
tcactctcacccaggctggagtgcaatggtgtgatctcggcccactgcactccagcctgggcgacagagcaagattccatctcaaaaaaaaaaaaaaaaaaggcatcccaatagatgctggagaccaatggcaaccttaggcagggactccatttgctcctcagcatcacccatcacagggcaggcactctggagacttcc

SEQ ID NO: 21496 - DNA, 201 bp, Homo sapiens
aaattagcccagcatggtggcgggtgcctgtaatcccggctactcaggaggctgaggtacgagaatcacttgaacccaggaggcagagattgcagtgagcygagatcacgctattacaccccagcctgggtgacagagtgagactctgtctcaaaaacaaacaaacaaaattatcatgggtacggctcattctgcttgcct

SEQ ID NO: 21497 - DNA, 201 bp, Homo sapiens; identical to SEQ ID NO: 6665

SEQ ID NO: 21498 - DNA, 201 bp, Homo sapiens
caaagatcagtcgggcatggttgcttgcacctgtagtcctagctactcaagaagctgaggtaggagaatcccttgagcccaggaggttgaggctgcagtgygcattgctccactgcactctagcctgggcgacagtgagaccctgtctcaaaaaaaaatagaggttgggaactgtctctagagctgcgctgcttaccagct

SEQ ID NO: 21499 - DNA, 201 bp, Homo sapiens
acccaccctgcccagcaggcttccctcaggccccaactcctattgcacctgcttagggaagccgggtgcctctcccttcatgtgtgagaggaggtgcgtgyccccagcacttgagtcagactgtcttttatgtcttgtcacatggtaaagagcctccctaaccagacataagctccttcccacagagccagggctgtggga

SEQ ID NO: 21500 - DNA, 201 bp, Homo sapiens
aacccaccctgcccagcaggcttccctcaggccccaactcctattgcacctgcttagggaagccgggtgcctctcccttcatgtgtgagaggaggtgcgtstccccagcacttgagtcagactgtcttttatgtcttgtcacatggtaaagagcctccctaaccagacataagctccttcccacagagccagggctgtggg

SEQ ID NO: 21501 - DNA, 201 bp, Homo sapiens
catgtgagcaccctcccttgcccctgagtctttccttctccaagtcctctgtttctttctctaaatctgtacttaaaaaaacaaacaaacaaacaaaaacycttacgttagattttgagttggaatttccaggagtcaagtagtatggaaaatgagccgtgggatatggaagacagtgtattgaacaacagtttttagttg

SEQ ID NO: 21502 - DNA, 201 bp, Homo sapiens
cctaacccaccctgcccagcaggcttccctcaggccccaactcctattgcacctgcttagggaagccgggtgcctctcccttcatgtgtgagaggaggtgygtgtccccagcacttgagtcagactgtcttttatgtcttgtcacatggtaaagagcctccctaaccagacataagctccttcccacagagccagggctgt

SEQ ID NO: 21503 - DNA, 201 bp, Homo sapiens
agtgtgagctacttacgatataaaggttgaggccgggcgcagtggctcatgcctataatcccaggactttgggaggtcgaggtgggaggatcgcttaagtycaggagtgagacaccagcgtgtgcaacacggcaaaaccccatctctacaaagatcagtcgggcatggttgcttgcacctgtagtcctagctactcaagaa

SEQ ID NO: 21504 - DNA, 201 bp, Homo sapiens
gaagctgcttcctcagcaggtacagctggccggggcagagcagattggaacccagatgagtctgaatgcagagtttggctggggtcagtgtgagctacttrcgatataaaggttgaggccgggcgcagtggctcatgcctataatcccaggactttgggaggtcgaggtgggaggatcgcttaagtccaggagtgagacac

SEQ ID NO: 21505 - DNA, 201 bp, Homo sapiens
ctggaaggcggggaggtgaagatcttcagcaggaatcaggaagacaacactgggaagtacccggacatcatcagccgcatccccaaggtgggcgtctgccwcacacttgcactctgccagggtctgtggtcaggggtgcaaaggcctgaggcccatctaggccagtgtggcacagtgcggggtttattgggaggagatcag

SEQ ID NO: 21506 - DNA, 201 bp, Homo sapiens
tctccagcctgggcgagactccgcctcaaaaaaaaatcagaatgagatctagagcataatgacatttaaacaaatcagcacccacatgcagcaaggtgcaygtgcctacatggggagaggtgtagggattggaaatgaagaagaaaatgatggtagggccttccagagcagggctgggaggtgctgttggaactgaggaga

SEQ ID NO: 21507 - DNA, 201 bp, Homo sapiens
acctcggcctcccaaagtgctgggattacatgcctgtaggcatgagccaccatgcccggccaaaaacctttttttaaaaactgtattcttgagtggtctcmtgtgtagccgagtagagaatcgctggtctcgtggtgacagatagggaacaggggcaaggccagactaagggagacaaagcaacagatagtgacacgaagg

SEQ ID NO: 21508 - DNA, 201 bp, Homo sapiens
acacaaggatggtgacaaagatcaggaaggtggcaaacagtgaagggtcagtgaccccaggagaggtatagaaagacgctggcagcggccaggcacagtgkctcacgcctgtaatcccagcacttgggagcctgaagcaggcagatcacttgaggtcaggagtttgagaccagcctggccaacatggtgaaaccctgtctc

SEQ ID NO: 21509 - DNA, 201 bp, Homo sapiens
actggccacgtcttgatgctgtctcatctaagtagaagacaacagtactcttttttttttgaaatggagtctcactctcacccaggctggagtgcaatggygtgatctcggcccactgcactccagcctgggcgacagagcaagattccatctcaaaaaaaaaaaaaaaaaaggcatcccaatagatgctggagaccaatg

SEQ ID NO: 21510 - DNA, 201 bp, Homo sapiens
cctctgacctcccgcttcctccctgcagcttggaactggcttcagtgacgaggagctggaggagcatcaccagagcctcaaggtgagccatggcggctgcrcctcagcctccacccctctcccccctgcccctgacagcacagtccttccatgcagggctcttggcttccaccatcttggggctccaggtgtgggcaggag

SEQ ID NO: 21511 - DNA, 201 bp, Homo sapiens
accgtgttagccaggatggtcttgatctcctgacctcgtgatccgcccacctcggcctcccaaagtgttgggattacaggtgtgagccaccatgccaggcmccaacattttatatttagttgtttgcttaatatttctgcccttcaccagagtgttagcttcttgaaggcaggaacttcgtgtgtctgggtcactgccaaa

SEQ ID NO: 21512 - DNA, 201 bp, Homo sapiens
actacaggcgcctgccaccacacccagctaattttttttgtatttttagtagaagcagggtttcaccgtgttagccaggatggtcttgatctcctgacctygtgatccgcccacctcggcctcccaaagtgttgggattacaggtgtgagccaccatgccaggccccaacattttatatttagttgtttgcttaatatttc

SEQ ID NO: 21513 - DNA, 201 bp, Homo sapiens
atacaaaaattagccaggtgtggtggtgggcgcctgtaatcccagctccttgggaggctgaggcggaaggctctcttgaacccgggaggtggaggttgcaktgagcagagattgcaccactgctctccagcctgggcgagactccgcctcaaaaaaaaatcagaatgagatctagagcataatgacatttaaacaaatcag

SEQ ID NO: 21514 - DNA, 201 bp, Homo sapiens
agagaggtcctgtatacccttggccagtttccattgtcaatatcatacattactatgatccgtttctcaccactgagatactaatgtcagtacattactcktaactgaactccatactttattattcagatttcaccagattttttttttaatgttcacgccttccaacatttttttttttttttttttgagacagagtct

SEQ ID NO: 21515 - DNA, 201 bp, Homo sapiens
tgcctggctcagtttcctcatctgtcacatggggctgtgtgatatctggggtcccttccaggctctgaagattcttctggtttttgaggagagggtctacrtacatcaaggtcgaggagatcagagaagggaggaggcaagattggggaggtgcagacaagcccccttccctggcctgctctctccccaggtccctgagcg

SEQ ID NO: 21516 - DNA, 201 bp, Homo sapiens
gatgctatatatgccgccctgctcaagggctgtgaccggactgtcttaaaataaatagacatagaggctgggcgcagtggctcacgcctgtaatcccagcrctttgggaggctaaggtgggcggatcacctgaggtcgaaagttcaagaccagcctggctctactaaaaatacaaaaattagccaggtgtggtggtgggcg

SEQ ID NO: 21517 - DNA, 201 bp, Homo sapiens
tctggggtcccttccaggctctgaagattcttctggtttttgaggagagggtctacatacatcaaggtcgaggagatcagagaagggaggaggcaagattsgggaggtgcagacaagcccccttccctggcctgctctctccccaggtccctgagcggacggctgcgccttgggctggcagagcagtcggtgctggctgcc

SEQ ID NO: 21518 - DNA, 201 bp, Homo sapiens
tataaagccgtcagatctcgtgagacttcctcactatcacgagaacagcacgggaaaaacctgcccccatcgttcagttacctcccaccaggtccctccaygacacatggggattttgggagctatgattcaagacaagatgtgggtggggacacacggaccctgacaccatctctgtcccactctttggttctctctctc

SEQ ID NO: 21519 - DNA, 201 bp, Homo sapiens
aacccaggaggcagagggtgcagtgagccaagatcgtgccactacactacagcctccacgataagagtgagactccatcttttaaaaaaaaaaaaaaaaaagggtggatccaacagacacaggatcagagatggatctccaaaatagtgttgagaaaaaagacacaagatgatttacgatagtgacaatgatttcttgaca

SEQ ID NO: 21520 - DNA, 201 bp, Homo sapiens
ttagagcccagtttcactggcccagcctgggccacatacctatccctgaaccagccacagggatgcagcctggatcacgtgtccacccctggtcacaggcraaagggccagcccactcaaatcgtgtgtactgagagaatgtggggtaagaagcatcccaagaggaaaacggaggggctgttaccaggaggaaaaaatgga

SEQ ID NO: 21521 - DNA, 201 bp, Homo sapiens
acacagaagtgtccagagcaagggaggtggccagggaaggtacaggtgtgcagctgtgtcccagggatgacccggggacccaggttcctgtgtccctctgmcctccaaaggttgtcaccccaatgtctgtgatcaaatgtggctcacttccctgttctaattgtgggaggagggacgcagaggagggaggggaggcaacca

SEQ ID NO: 21522 - DNA, 201 bp, Homo sapiens
cagggttattattgcctttgctttttagcaaatctgctgtggcaggctgtggattttgagagtcaggggaggggtgtgtgtgtgagggggtggcttactcyggagtctgggattcatcccgtcatttctttcaataaataattatcggatagctactttgtgacagggtctgtgctgggctctgggggcaaagctgtcatg

SEQ ID NO: 21523 - DNA, 201 bp, Homo sapiens
gaggagggaggggaggcaaccagattccttgcaaggatgtgagccagacattgcacatgctgcgtgggttccaatcacatggcctttcccacctggaaggmaggccgggggctgtagtccccagtgggaggctaggtccccttctaaaacgtgggaggcttcgtgactgaatagcaagaaagcagaatggtcctggggccc

SEQ ID NO: 21524 - DNA, 201 bp, Homo sapiens
ccctgggaatctgtctctctccattgttcagctctactgtccttgaggttgtcctcaccctcaggcgggctctcccctcttagcggtccccttggaaagakggtgttagagcccagtttcactggcccagcctgggccacatacctatccctgaaccagccacagggatgcagcctggatcacgtgtccacccctggtcac

SEQ ID NO: 21525 - DNA, 201 bp, Homo sapiens
ggaggatcacttgagcccaggagttcgggaccagcctgggcaacatagtgagaccccacctctacaaaaacttttttaaaaaattagccaggcgtggtggygcatgcctgtggtcccagctacttgggaggctgaggcaggaggattgcttgagcccaggaggtggaggttgcagtgagccaagattgcaccactgcactc

SEQ ID NO: 21526 - DNA, 201 bp, Homo sapiens
gtcaggccagatagaatttctttctgtcacacagaagtgtccagagcaagggaggtggccagggaaggtacaggtgtgcagctgtgtcccagggatgaccyggggacccaggttcctgtgtccctctgccctccaaaggttgtcaccccaatgtctgtgatcaaatgtggctcacttccctgttctaattgtgggaggagg

SEQ ID NO: 21527 - DNA, 201 bp, Homo sapiens
cagtgtctggagatatttttggttgttacaacctagggacagagggtttgccattggcatctagtggctaaaagccaggcatgctgctaaacatccttcarttcataggacagcccccccaacaacacagaaccatcaggcccaacatgtcaatagtgtctaggttgagaaacctcgtgttaatgcagtccggcttcagga

SEQ ID NO: 21528 - DNA, 201 bp, Homo sapiens
atgggccagaaggcagtgggtcaggccagatagaatttctttctgtcacacagaagtgtccagagcaagggaggtggccagggaaggtacaggtgtgcagytgtgtcccagggatgacccggggacccaggttcctgtgtccctctgccctccaaaggttgtcaccccaatgtctgtgatcaaatgtggctcacttccctg

SEQ ID NO: 21529 - DNA, 201 bp, Homo sapiens
ggatttctgttccaggagcagctgacagacgaagaaaagtgctggacaggaagggagaattctgacgccaacatgcagcgaagtatcatgtgagcaccctyccttgcccctgagtctttccttctccaagtcctctgtttctttctctaaatctgtacttaaaaaaacaaacaaacaaacaaaaacccttacgttagattt

SEQ ID NO: 21530 - DNA, 201 bp, Homo sapiens
acctccgcctcccgggttcaagcgattcccctgcctcagcctcccgagtagctgggattacaggcacacgccaccacgcccggctaattttgtatttttartagagacggggtttctccatgttggtcagactggtctcgaactcccgacctcaggtgatccacccgcctcggcctcccaaaatgctgggattacaggcat

SEQ ID NO: 21531 - DNA, 201 bp, Homo sapiens
gccactgcgttccagcctgggcaacagagtgagactgtcttaaaaaaaagaaagacgctgacagcaagggagggcagccggcaacatgaggtttctgagtkccagacagggctgtgcatgcagaaaggccttaagggacccagagaggagcaggtgactgacacatggtgaagggtcttgacagtcatggagaggacatcc

SEQ ID NO: 21532 - DNA, 201 bp, Homo sapiens
tggctgccctctcccaggcagtgagcctcacgcccccgggccaaggtgagctcctgtggcccgtctctgcatccctcgctggagttacctcaggcttcccycctcctcttcagaggcccatgcccgccccttccccagcgggcccctgccataccaggctcctctctcctgggtgggggggagggggcgtcttgggccgcg

SEQ ID NO: 21533 - DNA, 201 bp, Homo sapiens
atggggaggcaaactaagccacttgtctcctgccactggctcaaagcaaggaccatgctggggtcctgaccatcacagtcaccagggcgggcgccaggctyagttctctccctgactcatcctcctcaagcctcgccaacccctcagggcagctgagatgggaggtgctggtgcacctacttgtgcccctccccagtctat

SEQ ID NO: 21534 - DNA, 201 bp, Homo sapiens
gtttcactctcattgcccaggctggagtgcaatggcacgatcttggctcactgcaacctccgcctcccgggttcaagcgattcccctgcctcagcctcccragtagctgggattacaggcacacgccaccacgcccggctaattttgtatttttagtagagacggggtttctccatgttggtcagactggtctcgaactcc

SEQ ID NO: 21535 - DNA, 201 bp, Homo sapiens
tggatctcttgtgatgtgcacctgtagtcccagctactcgggaggccgacgcaagacagtcgcttgaattcaggaggcggaggctgcagtcagccaagatygcaccaccgcactccagcctgggcgacagagcgagattccgtctcaaaaaaacaaaaacaaaaaacaaaactgatgagatgcccgtaaagtgttaattca

SEQ ID NO: 21536 - DNA, 201 bp, Homo sapiens
aactgatttcaaagcaaaacacaaaactgtaaatgtgctggaaaaactcagtgaaaacttttggaattctaaggaaaggaggacttttttttttttttttwaattatcttggggatgaggctggatgcagtggctcacgcctgtaatcccaacactttgggaggctgaggtgggtggatctcttgtgatgtgcacctgtag

SEQ ID NO: 21537 - DNA, 201 bp, Homo sapiens
attggcatgatcttggctcactgtaacctccacctcctggcttcaagtgattctcctgcctcagcctcccaagtagctgggactacaggcgcccgctaccrtgcccggctaattttttgtatttttagtagagacgaggtttcaccatgttggccaagatggtctcgatctcttgacctcatgatccacccacctcagcct

SEQ ID NO: 21538 - DNA, 201 bp, Homo sapiens
gaggaggaggaaggtgagcccccagaaggagaggtgtgtgtgtgtgtgtgtgtgtgtgtgtgtgtgtgtgtgtgtgtgtgtgtgttttggatctgcaaggkcaggggcctgagagctcaggatgtttggaccctgccgatttgatgcctgtgtccaggcatccaggaattccacctaccaatatgggaacttttgttctga

SEQ ID NO: 21539 - DNA, 201 bp, Homo sapiens
cacggggtgactgagagcagaggtggtgatctagacaaggctggtgcttgacacaaggatggtgacaaagatcaggaaggtggcaaacagtgaagggtcartgaccccaggagaggtatagaaagacgctggcagcggccaggcacagtggctcacgcctgtaatcccagcacttgggagcctgaagcaggcagatcactt

SEQ ID NO: 21540 - DNA, 201 bp, Homo sapiens
ccacgcgtgtgtcaggaaggcttctgggtagaccatcagctgggtcgcatcagtccttctcatggggtgcacagcttcctctcctccttcctgcacccaakcctaggggagtctcctcttcagagtctagcagacctaatgccatggctgccacatgacaggactcagtaaatacttcctggataaagggagagggaggca

SEQ ID NO: 21541 - DNA, 201 bp, Homo sapiens
taagagcacgggtccaccatccactggctgtatgacctgggacaaatgactgaccttctctgagcttaggttgctttatctgtagagatgatgataatgayagcacctaccgcacagaaatatctgagttagaagataacacgtgtacgctgctcagaactgggcccagccctcagtcggggctcagtcattgtgggtcat

SEQ ID NO: 21542 - DNA, 201 bp, Homo sapiens
gatgaccacccactggtgggttctcatccgcctggggagaggatgtgctgggagcactggagctggcttagggccatgggcaccaacatttagggaagtcrggggtttcaggctttcatgagaggacagagggactgagaaaggttgacttggatcaggaaagagttacgggcttatgggagccagaggagatgagactca

SEQ ID NO: 21543 - DNA, 201 bp, Homo sapiens
cacggtagcagtggcttaggcaagacgcaaacttatttttctctctcctgagtgcagagtccgggattcatgtgaccgtctcacagggtcagaggcccagrcttcctctgtgctgtcgtttgctctctgtagatgcccttgtccctgtgaacatccatattctgccaacaggaagaggagggcaccccactcaacattaag

SEQ ID NO: 21544 - DNA, 201 bp, Homo sapiens
gggatgaccacccactggtgggttctcatccgcctggggagaggatgtgctgggagcactggagctggcttagggccatgggcaccaacatttagggaagkcgggggtttcaggctttcatgagaggacagagggactgagaaaggttgacttggatcaggaaagagttacgggcttatgggagccagaggagatgagact

SEQ ID NO: 21545 - DNA, 201 bp, Homo sapiens
gatttccctgatgttggtttttgtatttcttctctgcaccttaaaaacctcggtaatgagacttctgtaggaaaaacccagcttctgtttctaatgaggcyccctaagtttttcagtaacaaagccattctttccagctttgaagttttagacagaaacacggttttcgttttagaggtggtgcagcttggtggctgggag

SEQ ID NO: 21546 - DNA, 201 bp, Homo sapiens
caccggaggctctctaagcagagtcttggttgggagaaatggtcaagtctctccctcctgtgttttggcgacaatcagcagcattgaaagggacagagagrcagccctgggaagtgagctcatgcatttgggtattggcaagggtgtcccgaggaggcgtgaggaagcaagggtgcagacgggcagcatggtatagcctgc

SEQ ID NO: 21547 - DNA, 201 bp, Homo sapiens
tgcttgaacctgggagatggaggttgtggtgagccgagatcgtgccattgcactccagcctgaacaacagggcaagactccatctcaaaaaaaaaaaaaaattatctgagacctgtatctccatcagggtctcaatgggagacagaaaccataccagtgatttgaacagagggagtttaaaggatggtcactaggtatgca

SEQ ID NO: 21548 - DNA, 201 bp, Homo sapiens
tccctgaccaccctgtgaagcagcaccctcatctcatcctcttcctctactcggctttcttttgttttctgaaagatttttttaacacctaaaattaatgwtgtgtttatgtgggggctttttgcccactttcctctgactctcctgctggaatgtgagctccaggttagcaaactttgttttcatccagctctgcaccgt

SEQ ID NO: 21549 - DNA, 201 bp, Homo sapiens
ggcagaggttgcagcgagccgagatcatgccactgcactccagcctgggcaacagagtgagactctgtctcaagaaaaaaggaaaggtcccttcctcccakgtctgattgttaatcgatgtggtgttagcatggcacctggcactttgcgacacccgggactatacgcacctccctctgtcccagctcagctacgcaatcc

SEQ ID NO: 21550 - DNA, 201 bp, Homo sapiens
aagagctatgggggtccttgatgggaccatgatcctgcactggagggcgggatgatggcccaggtgagaagaggccacccctgagttagggctgagaccayagggtcagaaaggagggtagacagagaggtttcagtcccctctactctcaacttttggaaaatggggtccctccttcccccgctcactctagaactgttc

SEQ ID NO: 21551 - DNA, 201 bp, Homo sapiens
ccttgttagtttgcagggcaccttttatcctaggaagaacttgtcccatcagaaagagactggactggctagcagctggagctctggggtcaggttcaggrgcttcaaattcaggatcatcgctgactcagcatgtggcttatgctactccctttttctctttaagggtcagttttcccatctgtaaaatgaggtggatga

SEQ ID NO: 21552 - DNA, 201 bp, Homo sapiens
caggctattcatttcaaagagctgggtgtcgctcacttctggtggctccgaggaacacctcagccaaggccctttccttcccatgctcaggacgcccttcygccttgcccattccttgttagtttgcagggcaccttttatcctaggaagaacttgtcccatcagaaagagactggactggctagcagctggagctctggg

SEQ ID NO: 21553 - DNA, 201 bp, Homo sapiens
tctcactgctacctccgcctcccaggttcaagcgattcttctgccttggctgaggcagcctccctagtagctgggatcaaaggcatgagccaccatgcccrgctaattttttgtatttagtagagatggggttctgccatgttggtcagtctggcctcaaactcctcacctcaggtgatccacccacctcgacctcccaaa

SEQ ID NO: 21554 - DNA, 201 bp, Homo sapiens
agtcatgtatcccaattaaacagatgagaaaagtgaggctcatgaagattataaatcttatccaagatcctgccatctctagaataaatgttaggactttwtttttttgagacggggtttcactgttgtccccaggctggagtgcaatggtgcaatctcggctcactacaacctctgcctcccgggttcaagccagtctcc

SEQ ID NO: 21555 - DNA, 201 bp, Homo sapiens
ttgccatttgtctgtcttctttagagagatagctgttcacgtcttttgcccatttgtcttctttagagagatggctgttcacgtcttttgcccatttgtcytctttagagagatggctgttcacgtcttttgcccatagttattagattgatgcaaaagtaattgtgattttgccattaaaagcaatatttgtcattatgc

SEQ ID NO: 21556 - DNA, 201 bp, Homo sapiens
tgatgtctcgctgaggaggtcctggaagctccagaccctctccacctggtcaacatggagcaagcgcttgtggagaaccaaagcccaaaagccccagatcsccttaaagcagagagggagggcaggcgggagggagggcattggcatgcggcgctgtgcatggggtgagacccagagcggtatctttgccaggatgggggc

SEQ ID NO: 21557 - DNA, 201 bp, Homo sapiens
aataaatagggaagaaaaataacgtattccaaacacctgcaatggatcaatgcctctgtatactttatctgatttaatcctcaaaaaaacaaacaaacaaaaacaaaaacacgcacacaaacacattaggagtaagcaagcagtcatgtatcccaattaaacagatgagaaaagtgaggctcatgaagattataaatctta

SEQ ID NO: 21558 - DNA, 201 bp, Homo sapiens
aatggacagttgcttgtcaaagggtacaaagttttggttagacaggaggaataacttttgagatctattgcacagcaggataactatagtaaataataatrtatgtttcaaaaatcacctaaaaagtaagttttaaatgtatcgctgggcactttggctcaggactgtaagcctagcactttggaaggacaaggtggaagg

SEQ ID NO: 21559 - DNA, 201 bp, Homo sapiens
aagcgatctgcccacctcggcctcccaaagttctgggattacaggcgtgagccaccgagcccagcctgtaagccaattttatctcaacctcatgaggtagmtctattaaacatgccaacttgacagatgagaaactgaggcacagggttaagtaacttgccacagagatctgattcccatttcatagatggagaaatggaa

SEQ ID NO: 21560 - DNA, 201 bp, Homo sapiens
ttctctcttaactttcagagctgcgggaagcatttcttgagttcgataaggaccgagatgggttcatctcttgtaaggatctggggaatctcatgaggackatgggttacatgcccacggagatggaactgattgagctcggccagcaaatccgcatgaactgtgagtccagggaatgggagggatggccggggttaggga

SEQ ID NO: 21561 - DNA, 201 bp, Homo sapiens
caataaatagggaagaaaaataacgtattccaaacacctgcaatggatcaatgcctctgtatactttatctgatttaatcctcaaaaaaacaaacaaacaaaaacaaaaacacgcacacaaacacattaggagtaagcaagcagtcatgtatcccaattaaacagatgagaaaagtgaggctcatgaagattataaatctt

SEQ ID NO: 21562 - DNA, 201 bp, Homo sapiens
ggcatgagccaccgtgcctggccagggcctctattcttagtgcctgtaacaggaagaatccaagaatttgagatcccagaagggaatgcaaagtggtcatmtggtacgaaccacttgctgcagacatactaaaaaatatcagacccagtgagaataacagacttgcttatatcccctgataaaataccttctcgttctgag

SEQ ID NO: 21563 - DNA, 201 bp, Homo sapiens
aaagggtacaaagttttggttagacaggaggaataacttttgagatctattgcacagcaggataactatagtaaataataatgtatgtttcaaaaatcacytaaaaagtaagttttaaatgtatcgctgggcactttggctcaggactgtaagcctagcactttggaaggacaaggtggaagggttgcttaaggccaagat

SEQ ID NO: 21564 - DNA, 201 bp, Homo sapiens
gcttaaggccaagattttaagaccaacctggccaaaatagtgagaccccgtctcattaaaaaaaagtttcggccgggcacagtggctcaagcctgtaatcycagcactttaggaggctgaggcaggtggatcaactgaggtcaggagttcaagatcagcctggccaacatggtgaaaccctgtctctactaaaaatacaaa

SEQ ID NO: 21565 - DNA, 201 bp, Homo sapiens
tcaataaatagggaagaaaaataacgtattccaaacacctgcaatggatcaatgcctctgtatactttatctgatttaatcctcaaaaaaacaaacaaacaaaaacaaaaacacgcacacaaacacattaggagtaagcaagcagtcatgtatcccaattaaacagatgagaaaagtgaggctcatgaagattataaatct

SEQ ID NO: 21566 - DNA, 201 bp, Homo sapiens
aagtttcggccgggcacagtggctcaagcctgtaatctcagcactttaggaggctgaggcaggtggatcaactgaggtcaggagttcaagatcagcctggycaacatggtgaaaccctgtctctactaaaaatacaaatattaaacaggtttggtggtgcgcgcctgtaatcccagctactcgggaggctgagggacgaga

SEQ ID NO: 21567 - DNA, 201 bp, Homo sapiens
atcaataaatagggaagaaaaataacgtattccaaacacctgcaatggatcaatgcctctgtatactttatctgatttaatcctcaaaaaaacaaacaaacaaaaacaaaaacacgcacacaaacacattaggagtaagcaagcagtcatgtatcccaattaaacagatgagaaaagtgaggctcatgaagattataaatc

SEQ ID NO: 21568 - DNA, 201 bp, Homo sapiens
tagaggcagaccctctgaggtctgcctgtaattagccaatgccatggacagcacccaccaaccaggcccccacctttttttttccagccatggtgggatcrataaatagggaagaaaaataacgtattccaaacacctgcaatggatcaatgcctctgtatactttatctgatttaatcctcaaaaaaacaaacaaacaaa

SEQ ID NO: 21569 - DNA, 201 bp, Homo sapiens
aaaccctgtctctactaaaaatacaaatattaaacaggtttggtggtgcgcgcctgtaatcccagctactcgggaggctgagggacgagaatcgcttgaayccaggaggtgaaggctgcagtgagctgagattgcaccactgcacttcagcctgggtgacagggtgagactgtctcaaataaaaaaaaaaaaaaaaagaaa

SEQ ID NO: 21570 - DNA, 201 bp, Homo sapiens
gcctgtaattagccaatgccatggacagcacccaccaaccaggcccccacctttttttttccagccatggtgggatcaataaatagggaagaaaaataacrtattccaaacacctgcaatggatcaatgcctctgtatactttatctgatttaatcctcaaaaaaacaaacaaacaaaaacaaaaacacgcacacaaacac

SEQ ID NO: 21571 - DNA, 201 bp, Homo sapiens
tcatggtgctggtgatggtagaggcagaccctctgaggtctgcctgtaattagccaatgccatggacagcacccaccaaccaggcccccacctttttttttccagccatggtgggatcaataaatagggaagaaaaataacgtattccaaacacctgcaatggatcaatgcctctgtatactttatctgatttaatcctca

SEQ ID NO: 21572 - DNA, 201 bp, Homo sapiens
agaaaaataacgtattccaaacacctgcaatggatcaatgcctctgtatactttatctgatttaatcctcaaaaaaacaaacaaacaaaaacaaaaacacrcacacaaacacattaggagtaagcaagcagtcatgtatcccaattaaacagatgagaaaagtgaggctcatgaagattataaatcttatccaagatcctg

SEQ ID NO: 21573 - DNA, 201 bp, Homo sapiens
aatccacttccaactcactgtcagattttccaagttggccactccttctcactcctctccaagtttgagaatggaagcgggtggcaggttttggaagcatytgttctgtccctttcttcccaggctattcatttcaaagagctgggtgtcgctcacttctggtggctccgaggaacacctcagccaaggccctttccttcc

SEQ ID NO: 21574 - DNA, 201 bp, Homo sapiens
aactccatcatctcgtggctatcatcattgtcattgctgatataatctatttctgcttctattcagtttgacacgaatggagatggggagatcaccctggyggagctacagcaggccatgcagagactcctgggggagcggctcaccccccgggagatctctgaggttgtccgggaggctgatgttaatggagacggcaca

SEQ ID NO: 21575 - DNA, 201 bp, Homo sapiens
tcctcagtgggtggccgtgtagactttgatgactttgtggagctgatgacccccaaattgcttgcagaaacagctgggatgatcggtgtccaggagatgcrggatgccttcaaggaggtgagttaacagtgtcatggtgctggtgatggtagaggcagaccctctgaggtctgcctgtaattagccaatgccatggacagc

SEQ ID NO: 21576 - DNA, 201 bp, Homo sapiens
ttatagggcagggagaagggagctgatctaactgactcgaagcacaaagtgaggtaatggaaggccagggcttgtggggtctcgctaatcctgtgccatcytcctcagtgggtggccgtgtagactttgatgactttgtggagctgatgacccccaaattgcttgcagaaacagctgggatgatcggtgtccaggagatgc

SEQ ID NO: 21577 - DNA, 201 bp, Homo sapiens
gagctgcgggaagcatttcttgagttcgataaggaccgagatgggttcatctcttgtaaggatctggggaatctcatgaggacgatgggttacatgcccasggagatggaactgattgagctcggccagcaaatccgcatgaactgtgagtccagggaatgggagggatggccggggttagggaagggatcagggcagaat

SEQ ID NO: 21578 - DNA, 201 bp, Homo sapiens
ccgtctggaataccctttcccctctcccctggctaactcctagttatgttcctggaaggtacctcccacctctcttactgggctccgtgtccctctgctgkctccccagtaatacctcccgcttgcttctgcagtaatacggattcgtggcatctctagagtttattgcctatttccttctgagaccatggaccaattcct

SEQ ID NO: 21579 - DNA, 201 bp, Homo sapiens; identical to SEQ ID NO: 6579

SEQ ID NO: 21580 - DNA, 201 bp, Homo sapiens
ccttccgtctggaataccctttcccctctcccctggctaactcctagttatgttcctggaaggtacctcccacctctcttactgggctccgtgtccctctkctggctccccagtaatacctcccgcttgcttctgcagtaatacggattcgtggcatctctagagtttattgcctatttccttctgagaccatggaccaat

SEQ ID NO: 21581 - DNA, 201 bp, Homo sapiens
tgcaagtggcattcaaagtcaactccttccttttcctgatttcctggaagcactgtctggtttctctctctctctctctctctctctctctctctctctcsctgtctgtctctgtctcccctcccacatcccttcctttgtgtaagatactcaggggactgaattaaaccacaaatctggattatcaaggtttagagctag

SEQ ID NO: 21582 - DNA, 201 bp, Homo sapiens
atcatgcacaaagcaccactgtatttttaaattttccttccctgtctttgctcaagttgtccttccgtctggaataccctttcccctctcccctggctaaytcctagttatgttcctggaaggtacctcccacctctcttactgggctccgtgtccctctgctggctccccagtaatacctcccgcttgcttctgcagtaa

SEQ ID NO: 21583 - DNA, 201 bp, Homo sapiens
tgtaaaatgaggtggatgatgacaccttttggagaaaactaaaagaaatcatgcacaaagcaccactgtatttttaaattttccttccctgtctttgctcragttgtccttccgtctggaataccctttcccctctcccctggctaactcctagttatgttcctggaaggtacctcccacctctcttactgggctccgtgt

SEQ ID NO: 21584 - DNA, 201 bp, Homo sapiens
taagggtcagttttcccatctgtaaaatgaggtggatgatgacaccttttggagaaaactaaaagaaatcatgcacaaagcaccactgtatttttaaattwtccttccctgtctttgctcaagttgtccttccgtctggaataccctttcccctctcccctggctaactcctagttatgttcctggaaggtacctcccacc

SEQ ID NO: 21585 - DNA, 201 bp, Homo sapiens
gtgagctgagattgcaccactgcacttcagcctgggtgacagggtgagactgtctcaaataaaaaaaaaaaaaaaaagaaagaaaaaaagaaaaaaaaaaacagaacaaaactgtcttttggagctgacgttctagtggctcacattcccaaagcttttatctcagtgcttgacccacagtaagcgataggtaaactccat

SEQ ID NO: 21586 - DNA, 201 bp, Homo sapiens
gtgaaggctgcagtgagctgagattgcaccactgcacttcagcctgggtgacagggtgagactgtctcaaataaaaaaaaaaaaaaaaagaaagaaaaaaagaaaaaaaaaaacagaacaaaactgtcttttggagctgacgttctagtggctcacattcccaaagcttttatctcagtgcttgacccacagtaagcgata

SEQ ID NO: 21587 - DNA, 201 bp, Homo sapiens
caaaaacaaaaacacgcacacaaacacattaggagtaagcaagcagtcatgtatcccaattaaacagatgagaaaagtgaggctcatgaagattataaatyttatccaagatcctgccatctctagaataaatgttaggactttttttttttgagacggggtttcactgttgtccccaggctggagtgcaatggtgcaatc

SEQ ID NO: 21588 - DNA, 201 bp, Homo sapiens
tcttcctcccagctgtgaagtcttacagaagtttttctgttcctctccatggaagttatcacagcagaccttgctgtgttgagttgtattagcttccaagrcctccatcctagatagagaggaggaagggccattctctaaaccatatatgctgtatgtcccagtatggaaacacagtagaggctggttggacacctgcta

SEQ ID NO: 21589 - DNA, 201 bp, Homo sapiens
tgtgttgagttgtattagcttccaaggcctccatcctagatagagaggaggaagggccattctctaaaccatatatgctgtatgtcccagtatggaaacayagtagaggctggttggacacctgctagatctagccaggattaggtgtgcagtggacatcaagtgacatctggagaaggtggggtgggggtgggagatgat

SEQ ID NO: 21590 - DNA, 201 bp, Homo sapiens
aaacagctgggatgatcggtgtccaggagatgcgggatgccttcaaggaggtgagttaacagtgtcatggtgctggtgatggtagaggcagaccctctgakgtctgcctgtaattagccaatgccatggacagcacccaccaaccaggcccccacctttttttttccagccatggtgggatcaataaatagggaagaaaaa

SEQ ID NO: 21591 - DNA, 201 bp, Homo sapiens
gcagtggacatcaagtgacatctggagaaggtggggtgggggtgggagatgatcctcaggccaaccaaaggcaagggaaggtcaggatgacctcaagaccygggtgggcagcaagatcgtcttgagccacagcaaagtcaggtgcaacctgcattccttccagggttcaccattcactatccacgtggcctcaggtatgtt

SEQ ID NO: 21592 - DNA, 201 bp, Homo sapiens
tcctcaggccaaccaaaggcaagggaaggtcaggatgacctcaagacccgggtgggcagcaagatcgtcttgagccacagcaaagtcaggtgcaacctgcrttccttccagggttcaccattcactatccacgtggcctcaggtatgttggtgaccctcgctggcgtaagtttccttatctgtaaagtgacacttatccct

SEQ ID NO: 21593 - DNA, 201 bp, Homo sapiens
agacccgggtgggcagcaagatcgtcttgagccacagcaaagtcaggtgcaacctgcattccttccagggttcaccattcactatccacgtggcctcaggyatgttggtgaccctcgctggcgtaagtttccttatctgtaaagtgacacttatccctccaggatggttgagatgatgaaatctcatagtgacaatcacag

SEQ ID NO: 21594 - DNA, 201 bp, Homo sapiens
acgaatggagatggggagatcaccctggtggagctacagcaggccatgcagagactcctgggggagcggctcaccccccgggagatctctgaggttgtccrggaggctgatgttaatggagacggcacagttgactttgaaggtgacattgacggggcgtggtggggagcgggggcagccaccgcaggaatccacttccaa

SEQ ID NO: 21595 - DNA, 201 bp, Homo sapiens
gctgatataatctatttctgcttctattcagtttgacacgaatggagatggggagatcaccctggtggagctacagcaggccatgcagagactcctggggragcggctcaccccccgggagatctctgaggttgtccgggaggctgatgttaatggagacggcacagttgactttgaaggtgacattgacggggcgtggtg

SEQ ID NO: 21596 - DNA, 201 bp, Homo sapiens
tccacgtggcctcaggtatgttggtgaccctcgctggcgtaagtttccttatctgtaaagtgacacttatccctccaggatggttgagatgatgaaatctsatagtgacaatcacaggttttttgggttttgttttttagatggagtctcactccgtcacccaggctgcactacagtggtgcaaccttggctcactgcaac

SEQ ID NO: 21597 - DNA, 201 bp, Homo sapiens
tcctctccaagtttgagaatggaagcgggtggcaggttttggaagcatttgttctgtccctttcttcccaggctattcatttcaaagagctgggtgtcgcycacttctggtggctccgaggaacacctcagccaaggccctttccttcccatgctcaggacgcccttccgccttgcccattccttgttagtttgcagggca

SEQ ID NO: 21598 - DNA, 201 bp, Homo sapiens
actcctctccaagtttgagaatggaagcgggtggcaggttttggaagcatttgttctgtccctttcttcccaggctattcatttcaaagagctgggtgtcsctcacttctggtggctccgaggaacacctcagccaaggccctttccttcccatgctcaggacgcccttccgccttgcccattccttgttagtttgcaggg

SEQ ID NO: 21599 - DNA, 201 bp, Homo sapiens
agagtttgtgaagatgatgtctcgctgaggaggtcctggaagctccagaccctctccacctggtcaacatggagcaagcgcttgtggagaaccaaagcccmaaagccccagatccccttaaagcagagagggagggcaggcgggagggagggcattggcatgcggcgctgtgcatggggtgagacccagagcggtatcttt

SEQ ID NO: 21600 - DNA, 201 bp, Homo sapiens
gggagggcaggcgggagggagggcattggcatgcggcgctgtgcatggggtgagacccagagcggtatctttgccaggatgggggcgtctgcagaactagrttaagaaggaagagtctgtggatggaaataggaagcgtgggagggtccagttgccacccccaaaaattccaatgattcttgacatcttttcacttcacgt

SEQ ID NO: 21601 - DNA, 201 bp, Homo sapiens
gttcatctcttgtaaggatctggggaatctcatgaggacgatgggttacatgcccacggagatggaactgattgagctcggccagcaaatccgcatgaacygtgagtccagggaatgggagggatggccggggttagggaagggatcagggcagaattgggaaggatgtagaggttaagagtagagttcggggtggagagg

SEQ ID NO: 21602 - DNA, 201 bp, Homo sapiens
ttaagtaatttcccagggatcaccagcagtgcctgccacataggaagggctcaaaaaataatgttgggggcttttacaacgagatgccttactggggattyttttttttctttgcagagtttgtgaagatgatgtctcgctgaggaggtcctggaagctccagaccctctccacctggtcaacatggagcaagcgcttgtg

SEQ ID NO: 21603 - DNA, 201 bp, Homo sapiens
atccgcatgaactgtgagtccagggaatgggagggatggccggggttagggaagggatcagggcagaattgggaaggatgtagaggttaagagtagagttsggggtggagaggaggatgagagggactagaagtctggaagaaaacaggtcagattcgactcaggaaggcagcatttgaagtggttaaaagcttttagaga

SEQ ID NO: 21604 - DNA, 201 bp, Homo sapiens
cttgggagaacaaggagaccctttggagaatgggtgaccctctctccaaattccctctcatctgcattcctttccaggaaagaccactgggacaagatgarattgaaggtaacaccgtcttccccagttgcttccacgttgccatccacccacctgacctgccctcagtccctttgtgcatttctgtataaattccattac

SEQ ID NO: 21605 - DNA, 201 bp, Homo sapiens
cactgggacaagatgagattgaaggtaacaccgtcttccccagttgcttccacgttgccatccacccacctgacctgccctcagtccctttgtgcatttcygtataaattccattacatggaatttttacaatccctctctcttcccactcaactgtaattttgtagaactctttctcgtggcagttgaaggacttcccaa

SEQ ID NO: 21606 - DNA, 201 bp, Homo sapiens
aaaaaaaaaaaaaaaaaagctattgggtttgcttctgggcatgtaacgaactaaacaaggttgaattcaaggtaatgatagtattcatatctgaaaaaaawttgtatgctcatttaattcatgctcctctttgtacaggtctacagaggaggagaaacatcttaaccaactgtctgaaagtcacacaggcagttacttcca

SEQ ID NO: 21607 - DNA, 201 bp, Homo sapiens
cagtgcaactgaggtgcatcatcccagtctaccgtggaaagctttgcagtttggaggcagaaaataatgtacaggcctgggatgctctgcggtggggaccsggggcatctggttgtacccgctccccggctccaagctgtctgactcccaccgaggctgaggacctggagtcagagtgggtcttgtcagcaggtgataggc

SEQ ID NO: 21608 - DNA, 201 bp, Homo sapiens
gtttggaggcagaaaataatgtacaggcctgggatgctctgcggtggggacccggggcatctggttgtacccgctccccggctccaagctgtctgactccyaccgaggctgaggacctggagtcagagtgggtcttgtcagcaggtgataggcacgaatcaaaaccttatccacaaggacaggcccccaccctgtgtgtgg

SEQ ID NO: 21609 - DNA, 201 bp, Homo sapiens
cccagagctgagggtgctcagtgtggatggatgtttggctcagcaaggtctcagcaaccgggtgacagatggaatacaagggaagcaggaatcttctcccragaaccatgcaccccccattcccagagatcagggtgaacagtgccccacctctgacagtctggaggtgtcgtcccaagaggcaccagctggtcactgggt

SEQ ID NO: 21610 - DNA, 201 bp, Homo sapiens
agctagcacagcctgctgggcagggatctgtggcttttggagtacattttatgtccacttgaggagtgagtagcattggcagtgggggcattgcttgccakggctatcccctggcaggggctgggcaatcaagacagggagggcttgggggactcctgggtttcccttcgggcaggcacattctgcaacaagcccagaatg

SEQ ID NO: 21611 - DNA, 201 bp, Homo sapiens
ttgtgcctgggacgccatgtcaatatttgcggtgctggattagtcagggctctacctctgacccggcgccagctgggctggcttccattccctccaggtgkgtacgggcctgggagtggctcctgtggggtccggttgcttttgggcaaggaggggcagtacaagggatgctggtcctacaagtgagatcctgagtgcccg

SEQ ID NO: 21612 - DNA, 201 bp, Homo sapiens
gggtacgggcctgggagtggctcctgtggggtccggttgcttttgggcaaggaggggcagtacaagggatgctggtcctacaagtgagatcctgagtgccygtcttatcctgacaatttgtctcatgcatatagtcatatcacttcatttccctgagcctcagtctcctcacctgtaaaatgggaacaataatggctaatg

SEQ ID NO: 21613 - DNA, 201 bp, Homo sapiens
ccgtcttatcctgacaatttgtctcatgcatatagtcatatcacttcatttccctgagcctcagtctcctcacctgtaaaatgggaacaataatggctaaygcaggccaatgtctagcacacagaaggtttccagtacattacagctattgtcacattattactattactgatactattattatcatcattacaatgatta

SEQ ID NO: 21614 - DNA, 201 bp, Homo sapiens
aggccccggcccagttaactcaccacccctgcagggtgagccagaacgtgcctcgctgccacaggattggctgttacctctcccgagaccggcccggcttyctccctccctccctccctccctccctttgtttaggtctgtgctcctctgcttcccccagagacgcctcccctgctgactgctgtagctagccttgcccca

SEQ ID NO: 21615 - DNA, 201 bp, Homo sapiens
gatggggtttcaccgtgttggccaggctagtctcgaacccctgacctcagagaaaccacccaccttggcctcccaaagtgctggaattacaggtatgagcyaccacgcccagccttctctctccatttttggcaaatcaaattcatctgtctcagactcctcatatacacccagattagagggaaatttaatctccctcct

SEQ ID NO: 21616 - DNA, 201 bp, Homo sapiens
gcgagacccccatctccacaaaaaaaaaaaaaaaaattaaaaagtggctgggcgtggtgactcacgtctgtagtcccagttacttgggaggctgaggtggraggattgcttgagcccagaaggtcaaggctgtagtgagctatgatcatgtcactgcactccagcctgggtgacacagcaagattctgtctctaaacctat

SEQ ID NO: 21617 - DNA, 201 bp, Homo sapiens
gacatagcctaaggtattgaccatgcctctctattggtcattatttcacttccaaatttttgccactataaataatatgatgacaaaaatcttcatatgtwattctttgctcggggttcttagaactagaataaatggatgaaggcgtattcccacttttattgcttttttcacatttagccaattttccttctgaaaggt

SEQ ID NO: 21618 - DNA, 201 bp, Homo sapiens
actcaatcttgctctgaacaagattctttaatctgctatgatattgagtataagaatcagctctgtagcttggtaacaaaaattcacactgagctgtgttygcattggtttagctctcagacagactcctgattaaacaaacagaagttctgaaagggttatgttatggatgcccaggggatgaggaggaaagggaggact

SEQ ID NO: 21619 - DNA, 201 bp, Homo sapiens
ttaatgaatgagtgaatggatgatgccctcactcttgccctcctgtgcatcgtgtctctccgctttgctgcaggatggcatttcaggacttcaaggcccamtttgataaagtggagatctgcaacctcactcccgatgccctggaggaagacgcgatccacaaatgggaggtgacggtccatcagggaagctgggttcgcg

SEQ ID NO: 21620 - DNA, 201 bp, Homo sapiens
cttacttaggtgggtgacctcagacaattttcttagtgacattaaacctttctacactcgtctgaaaaaaggagagactgacagttccctgcaggcttccygtagagctaaatggcatcacacacaggagccggcacagagccaggcaccgagtaggcattccttgaccttccaccccagacagtgtcaccttctcctgac

SEQ ID NO: 21621 - DNA, 201 bp, Homo sapiens
cttagtgacattaaacctttctacactcgtctgaaaaaaggagagactgacagttccctgcaggcttcccgtagagctaaatggcatcacacacaggagcyggcacagagccaggcaccgagtaggcattccttgaccttccaccccagacagtgtcaccttctcctgactcacaggccaccactcagggccagcccgttt

SEQ ID NO: 21622 - DNA, 201 bp, Homo sapiens
tgtgcatcgtgtctctccgctttgctgcaggatggcatttcaggacttcaaggcccactttgataaagtggagatctgcaacctcactcccgatgccctgraggaagacgcgatccacaaatgggaggtgacggtccatcagggaagctgggttcgcggctccacggctgggggctgccgcaatttcctgggtaggtaggc

SEQ ID NO: 21623 - DNA, 201 bp, Homo sapiens
gcaccgagtaggcattccttgaccttccaccccagacagtgtcaccttctcctgactcacaggccaccactcagggccagcccgtttcttctgtccctgargcctgcaatctgataagcagaggtactctcaagccctgtcaccaatagcacagaagtgtttcaaaggcaaagagagtgagcaggtcacatgtagctcagg

SEQ ID NO: 21624 - DNA, 201 bp, Homo sapiens
aacagttctggcagcacagtgagtggctggacgtggtgatcgatgaccgcctgcccaccttcagggaccgcttggttttcctccactctgccgaccacaaygagttctggagcgccttgctggaaaaagcctacgccaagtgagtgacagcttccccagctcaggcagcctcccgacaggagtctctacactagtctttgt

SEQ ID NO: 21625 - DNA, 201 bp, Homo sapiens
gggaccgcttggttttcctccactctgccgaccacaacgagttctggagcgccttgctggaaaaagcctacgccaagtgagtgacagcttccccagctcargcagcctcccgacaggagtctctacactagtctttgtagtgagcatctaagggctgggaaaaaatcagggctctgggtttgcaggtgaggctcggcagga

SEQ ID NO: 21626 - DNA, 201 bp, Homo sapiens
gctggttcccggggcgtgtggggccagagctggcttgtgcagacatgtgaaggagtggcctgtctactatcctcccgggctctgactcaggatcctgtccygattctgaggtgccccttcttcctcccctttcagccctcaggcccaccttgcatcaaggttgattctcaagaaagacttttacaacagcactctaacttt

SEQ ID NO: 21627 - DNA, 201 bp, Homo sapiens
ccggaacccttggggccaggttgagtggaacgggtcgtggagcgacaggtcagtcaccctatcctgcctctctggctggttcccggggcgtgtggggccaragctggcttgtgcagacatgtgaaggagtggcctgtctactatcctcccgggctctgactcaggatcctgtcccgattctgaggtgccccttcttcctcc

SEQ ID NO: 21628 - DNA, 201 bp, Homo sapiens
cccatttcccccagccccaggcaaccactcatctactttctctatagattctatttacatattctgaatattttatataaaaggaatcataggccgggtgyggtggctcacgcctgtaatcccagcactttgggaggccgagacaggcggatcacctaggtcaggagttcaagaccagcctggtcaacatggtgaaacccc

SEQ ID NO: 21629 - DNA, 201 bp, Homo sapiens
ggaaagaaggaagggagagagggaggaagggagggagggaggatggaaggaaggaaggaaggaaggaaggaaggaaggaaggaaggaaggaaggaaggaarggagaaaatatactattccaggatttgaaacccgcatatacagagggctgacttggtataggcagattccacagggcttactgtgggacttgagtatgca

SEQ ID NO: 21630 - DNA, 201 bp, Homo sapiens
gctgggaagttcagtaggtcagtcaataaatcttgaaaatgcaagataatttaaagcaaatggagccaccacggagataccattatctgtaattaagctgwgtctgggttggggctgcagggagatttctaaccaccctcccaagtactgccgaaccacttgggtggcagctatgaaatgtctgctcgcccagcccgtgct

SEQ ID NO: 21631 - DNA, 201 bp, Homo sapiens
atgagggcaggtgcatttccacactgcctggtaaccctagaaaaaaatgtcatcagatctgtgtgacatatggtcctaaaccatgctaaagccacattttatcatggaataacagctaaatgcctcagaagaacattaacggcattgcacggtgaatccttatggagcatacatttaaaactataagtgatgttttggcaa

SEQ ID NO: 21632 - DNA, 201 bp, Homo sapiens
caacctcccttcctgttcccagcagaccacacacaagctcatacacatgcatacatgtgctcaaacacacacgtgtgtagaagcacttgcaaacacatgcrtgcacacatacatgcacacacatgcacacatgtgagcaaacacatgctttcacacatgcaatgtataaataaaccacaaacagtgcacatacctgtcatg

SEQ ID NO: 21633 - DNA, 201 bp, Homo sapiens
tggggttcctgaattatgaaaggggtcacctggaggggtgatatctaaacctaggggctgtctgatggtagtatattaggcactgcaataaacaggcaagrcagggagattaggggaccacaggatcggatggagaaaatgggggctcatgtgactgcttaaagcacagcaggaaggtggctgagcgcagccctgggcggg

SEQ ID NO: 21634 - DNA, 201 bp, Homo sapiens
gtgctaaatgactagttaatgggtgcagcacaccaacatggcacaggtatacatatgtaacaaacctgcacgttgtgcacatgtaccctaaaacttaaagwataataaataaataaataaataaataaataaataaataaataaataaaaaataaaataaaataaaataaaaataaataaataaaacacaagttttaacca

SEQ ID NO: 21635 - DNA, 201 bp, Homo sapiens
gagcccaaagaagcttggaataggcccagacgctttgttttttagttctgttttgctttagacagagtctcactcttttaccctggctggagtgcagtggyataagcctagctcactgcagcctcaaactcatgggctcaagagatcctatcacctcagcttcctgagtagccgggactataggcacatgccatcatgctt

SEQ ID NO: 21636 - DNA, 201 bp, Homo sapiens
tgctaaatgactagttaatgggtgcagcacaccaacatggcacaggtatacatatgtaacaaacctgcacgttgtgcacatgtaccctaaaacttaaagtataataaataaataaataaataaataaataaataaataaataaataaaaaataaaataaaataaaataaaaataaataaataaaacacaagttttaaccaa

SEQ ID NO: 21637 - DNA, 201 bp, Homo sapiens
tgaagtgggtagacttttaattgtattttaagaaatctaatcaatgaaaagaaaaccagagaggcagggagatgttttttactgtggactcaggggaacayattacatctcccctatgttatgtggtgtggaaggggtgacatgggggtggctttaccctcgtccaagggctggaggactcgcaagaggccctgagatact

SEQ ID NO: 21638 - DNA, 201 bp, Homo sapiens
ctaaatgactagttaatgggtgcagcacaccaacatggcacaggtatacatatgtaacaaacctgcacgttgtgcacatgtaccctaaaacttaaagtataataaataaataaataaataaataaataaataaataaataaataaaaaataaaataaaataaaataaaaataaataaataaaacacaagttttaaccaagc

SEQ ID NO: 21639 - DNA, 201 bp, Homo sapiens
aatgactagttaatgggtgcagcacaccaacatggcacaggtatacatatgtaacaaacctgcacgttgtgcacatgtaccctaaaacttaaagtataataaataaataaataaataaataaataaataaataaataaataaaaaataaaataaaataaaataaaaataaataaataaaacacaagttttaaccaagcatg

SEQ ID NO: 21640 - DNA, 201 bp, Homo sapiens
cctcctggagaccaagatgtgtgtgttctagtctgtgctcttctagtccacaaggacctggcatgggagtgaggtgggtgcttggtataaagttctgttcsatgtcatcttcctctgtgctactgtcaactgaaataacaaacacagagacactctctaaaagaaaagctatttatttagggataaagcactgcaatggga

SEQ ID NO: 21641 - DNA, 201 bp, Homo sapiens
atgactagttaatgggtgcagcacaccaacatggcacaggtatacatatgtaacaaacctgcacgttgtgcacatgtaccctaaaacttaaagtataataaataaataaataaataaataaataaataaataaataaataaaaaataaaataaaataaaataaaaataaataaataaaacacaagttttaaccaagcatgg

SEQ ID NO: 21642 - DNA, 201 bp, Homo sapiens
agaacttctactagggctatgcagatggggaaatgtgaggttcaaggtctcgcacagagtccccactggggtactgcctagtggaactgtgggaaggcggycatcatcctccagacccaagaatggtggatccactggcagcttgcaccttgagcctggaaaagccacaggtactcaacaacccatgacagcagccaaagt

SEQ ID NO: 21643 - DNA, 201 bp, Homo sapiens
tgggaagaggtgggaaaaatccttcactcctctgcaggccccggcccagttaactcaccacccctgcagggtgagccagaacgtgcctcgctgccacaggwttggctgttacctctcccgagaccggcccggcttcctccctccctccctccctccctccctttgtttaggtctgtgctcctctgcttcccccagagacgc

SEQ ID NO: 21644 - DNA, 201 bp, Homo sapiens
acttccctcatgcttttcccttctaggtaagcttccgaggccagagaatcgagctcatccgaatccggaacccttggggccaggttgagtggaacgggtcrtggagcgacaggtcagtcaccctatcctgcctctctggctggttcccggggcgtgtggggccagagctggcttgtgcagacatgtgaaggagtggcctgt

SEQ ID NO: 21645 - DNA, 201 bp, Homo sapiens
acaccactcccaggcatctaacccaggcccaccgcctagctgccccttccacacatgcgtccgcagaaccccctgtgactggcacgtgtgcacaccaattmccagaaacactgacccacagaggagtcggtcacacatccagacacctccccaatttatacccgatggctaatttgtgtttacttggagagtttctgagtt

SEQ ID NO: 21646 - DNA, 201 bp, Homo sapiens
aacccagctctctcctgtcctctacagcaagcccgccagttcctcttctcccttactctctcgactccactcagctatgagtgtgccccaccaccccactmaccctgatcttgccagggacgccaccgactctcactttgctcgatcagattatcttgatccatcaggagcccttgacgtgctggattgcgggggaccaca

SEQ ID NO: 21647 - DNA, 201 bp, Homo sapiens
tgtgaccgggccaggcatgtagctgggtctgatccagcaggggaggcttgacttagacggtgggtgtgactctgctctttccatgttttagaccagaagtrctgcagaatctgaggcccggacgccgtttggtcttattaagggtcatgcctacagtgtaacgggaattgaccaggtaggcgacttgaactccaactgcag

SEQ ID NO: 21648 - DNA, 201 bp, Homo sapiens
gcagcagaaggggctggaggttgtgaccgggccaggcatgtagctgggtctgatccagcaggggaggcttgacttagacggtgggtgtgactctgctcttyccatgttttagaccagaagtgctgcagaatctgaggcccggacgccgtttggtcttattaagggtcatgcctacagtgtaacgggaattgaccaggtagg

SEQ ID NO: 21649 - DNA, 201 bp, Homo sapiens
gagactcaaccaagagtccatgaattgtgtccgaaaagccaagaggaacttccctaggaaacccctccctttcttgcccattgcagtgccctgacaaagaygaacacctgaacaaagacttcttcagataccacgcttctcgggccagaagcaagacgttcatcaacctgagagaagtctccgaccggttcaagctgcccc

SEQ ID NO: 21650 - DNA, 201 bp, Homo sapiens
gcacctggggcagcagaaggggctggaggttgtgaccgggccaggcatgtagctgggtctgatccagcaggggaggcttgacttagacggtgggtgtgackctgctctttccatgttttagaccagaagtgctgcagaatctgaggcccggacgccgtttggtcttattaagggtcatgcctacagtgtaacgggaattga

SEQ ID NO: 21651 - DNA, 201 bp, Homo sapiens
actagttaatgggtgcagcacaccaacatggcacaggtatacatatgtaacaaacctgcacgttgtgcacatgtaccctaaaacttaaagtataataaataaataaataaataaataaataaataaataaataaataaaaaataaaataaaataaaataaaaataaataaataaaacacaagttttaaccaagcatggtgg

SEQ ID NO: 21652 - DNA, 201 bp, Homo sapiens
cgcctgagagtcccccgcacactcgcccctgcaccacagattcacactctcacgctgcattcacaccaagggcagcagtcccactgggtctggggaccccmgctttgaggagtgaaacagtggcttcctcttctgagccctctcctcagctgcctgggagctccctcaaaggtgcagactcacctcggggctcggatacag

SEQ ID NO: 21653 - DNA, 201 bp, Homo sapiens
aatttcctttctttcccaattctccttcagtcctgtgttagtcaggattcttcagagaaatagaatcactagggaaccaaatatatatacatacaattaaacacacacacacctatctatctatctatctatctatctatctatctatctatctatctatctatctatctatctacatcacacagttgacccttgagcaac

SEQ ID NO: 21654 - DNA, 201 bp, Homo sapiens
atttcctttctttcccaattctccttcagtcctgtgttagtcaggattcttcagagaaatagaatcactagggaaccaaatatatatacatacaattaaacacacacacacctatctatctatctatctatctatctatctatctatctatctatctatctatctatctatctacatcacacagttgacccttgagcaaca

SEQ ID NO: 21655 - DNA, 201 bp, Homo sapiens
gatgcttcttttttatttttaaaaagtcgtatatgacatatcgataaataatcgtatatgataaaatgtatatgacataaattttaccatttttaagtgtkcagttgagtagcattaagtacatccatgttgttgtgcagctatcaccacgatctatctccagcactttttcatcttgcaaaactgaaattctgtccctat

SEQ ID NO: 21656 - DNA, 201 bp, Homo sapiens
ttcccaattctccttcagtcctgtgttagtcaggattcttcagagaaatagaatcactagggaaccaaatatatatacatacaattaaacacacacacacctatctatctatctatctatctatctatctatctatctatctatctatctatctatctatctacatcacacagttgacccttgagcaacacaggcttgaac

SEQ ID NO: 21657 - DNA, 201 bp, Homo sapiens
tcccaattctccttcagtcctgtgttagtcaggattcttcagagaaatagaatcactagggaaccaaatatatatacatacaattaaacacacacacacctatctatctatctatctatctatctatctatctatctatctatctatctatctatctatctacatcacacagttgacccttgagcaacacaggcttgaact

SEQ ID NO: 21658 - DNA, 201 bp, Homo sapiens
ccaattctccttcagtcctgtgttagtcaggattcttcagagaaatagaatcactagggaaccaaatatatatacatacaattaaacacacacacacctatctatctatctatctatctatctatctatctatctatctatctatctatctatctatctacatcacacagttgacccttgagcaacacaggcttgaactta

SEQ ID NO: 21659 - DNA, 201 bp, Homo sapiens
gcatagagtcgcagggagccggggggtagcgggccatagggaaatcacaagcattgccaggttccctgcagacctctgtggcttgggcatcatttgcagtrggactcagcattacacggtgcacgtctcagcagcccgtgggaccgtggggctggacggccctcctcctcagcaccaccttcttgtcaaacacagctgtgc

SEQ ID NO: 21660 - DNA, 201 bp, Homo sapiens
aaggtgatgggtggtgttaaatcatgcactctgtgcgtggagcccttcctcctggaatcctgactctgaagccctgtgtagcctctttccattcttcaccrgctctaggatgtacctcctgcaactctcttctctccccttacgtatgaattccccccttcttctgaatcattccccttagcactccaacactatcatttc

SEQ ID NO: 21661 - DNA, 201 bp, Homo sapiens
gtagaaatcaagaaagtgactgagagccaaggctggaataaaatttgtcttccactcatgcagcctccatgggtgatgggaggggcaggcgccatcccgaytccctgacttcgctgtgctgctggtgacatgtgagtagggttgaaggcaccgcatggccagcctgtcaggccaattatctgggtgtgagccacttaggat

SEQ ID NO: 21662 - DNA, 201 bp, Homo sapiens
aattctccttcagtcctgtgttagtcaggattcttcagagaaatagaatcactagggaaccaaatatatatacatacaattaaacacacacacacctatctatctatctatctatctatctatctatctatctatctatctatctatctatctatctacatcacacagttgacccttgagcaacacaggcttgaacttata

SEQ ID NO: 21663 - DNA, 201 bp, Homo sapiens
agaggaaactcggaaattcacagcaggaagctccacaaagaagagcgtccatgtgagtgatccattgccctgcccctcttgaaggagcagccccaacaccwgggctgagcctgcccaaggtgatgggtggtgttaaatcatgcactctgtgcgtggagcccttcctcctggaatcctgactctgaagccctgtgtagcctc

SEQ ID NO: 21664 - DNA, 201 bp, Homo sapiens
cacagaggtagaaatcaagaaagtgactgagagccaaggctggaataaaatttgtcttccactcatgcagcctccatgggtgatgggaggggcaggcgccrtcccgactccctgacttcgctgtgctgctggtgacatgtgagtagggttgaaggcaccgcatggccagcctgtcaggccaattatctgggtgtgagccac

SEQ ID NO: 21665 - DNA, 201 bp, Homo sapiens
attctccttcagtcctgtgttagtcaggattcttcagagaaatagaatcactagggaaccaaatatatatacatacaattaaacacacacacacctatctatctatctatctatctatctatctatctatctatctatctatctatctatctatctacatcacacagttgacccttgagcaacacaggcttgaacttatat

SEQ ID NO: 21666 - DNA, 201 bp, Homo sapiens
cacagctaccaggtcaccagacatggtgcagccgctgctgtattagccagaccccagcgtgagggcagggcacacaggcctgtgctttccaggctgtcatkgtccccatggaggctctcgtcccaccatcctctgctctggccttggctgccgccttctgagaaccaagaagcattggcagagatgagctgagatgggttg

SEQ ID NO: 21667 - DNA, 201 bp, Homo sapiens
ttctccttcagtcctgtgttagtcaggattcttcagagaaatagaatcactagggaaccaaatatatatacatacaattaaacacacacacacctatctatctatctatctatctatctatctatctatctatctatctatctatctatctatctacatcacacagttgacccttgagcaacacaggcttgaacttatatg

SEQ ID NO: 21668 - DNA, 201 bp, Homo sapiens
gtgtgtccccacagctcctccagctctggtcccttgggaagtggaccaggtgactaagaaccagggatgtttgtgtgggtgcgtggcagggcctgcctgargctgttgctcgtccgctgcttgttgggctcctgaagccctttcctgccacatccatggcccctgagcttctggggaaatctgaagctagtctagaacttg

SEQ ID NO: 21669 - DNA, 201 bp, Homo sapiens
caatggtaaaagtcccagtctgagggcaggagagacggatgtcccagctcaggcacccaggaagagagagtgaattcccccttcctctgcctttttgttcwggtcaggtcttcacagatgagatgaggcccacctacactggggagggcaatctgttttactcaatcaacttaaatttcatgtcacccagaagcacccttg

SEQ ID NO: 21670 - DNA, 201 bp, Homo sapiens
ccctgactctctcctctctctcttgccacccttgcaggctaaatgggagctatgaagctctgaagggaggcagcgccatcgaggccatggaagacttcacygggggtgtggcagagaccttccaaactaaagaggcccccgagaacttctatgagattctagagaaggctttgaagagaggctccctgctgggctgcttca

SEQ ID NO: 21671 - DNA, 201 bp, Homo sapiens
tcccaggcatctaacccaggcccaccgcctagctgccccttccacacatgcgtccgcagaaccccctgtgactggcacgtgtgcacaccaattcccagaarcactgacccacagaggagtcggtcacacatccagacacctccccaatttatacccgatggctaatttgtgtttacttggagagtttctgagttttttcct

SEQ ID NO: 21672 - DNA, 201 bp, Homo sapiens
tccagacacctccccaatttatacccgatggctaatttgtgtttacttggagagtttctgagttttttccttttgtatttttctcctcattgggtgcgatytggtttaaaacaaaaacaaaaacagacctctcctgaacaaaacaaccaattgcaagataggagctgggaggcggtggcagctgcaggcacagttggtacg

SEQ ID NO: 21673 - DNA, 201 bp, Homo sapiens
aatcactgatgcagcaagatgctcaggatgacacagcaaagctgtaaataaatggctcccaaaaccactgtgcctaccctcctctttcaacccttttcttyttactcttagaggttaccttaggatcgctctcaggccaactgaaccagaaggaacgggtaggaggtgggtcactgcaggatacacagagaaactaccatg

SEQ ID NO: 21674 - DNA, 201 bp, Homo sapiens
tcctccctgttctacagtgagaggccgcagatcccctttgtgtggaaacgaccaggggtgagtggggcgagcaggggaaggagcatagatgaggccgaggytcagcagcccccgcaggaagtggaaacaggggtgctggggaggggccggctacgctcagtgcaactgaggtgcatcatcccagtctaccgtggaaagctt

SEQ ID NO: 21675 - DNA, 201 bp, Homo sapiens
tgacagtccagggaggatgttcatattctgtgggtggctctgttcatacagtgattcaggaacccaaacgccttctattgtgtggctctgccatcttctarggtcacgtcatcatctgcacatagccagcagaagagaagaataaaataaaacattgaaaaagacactctcactttctaaaaatcttgactcagaagtaaa

SEQ ID NO: 21676 - DNA, 201 bp, Homo sapiens
gtcatgtttcttttttgtggatcattttgtgcaagtttctttggctgttttttagcctccaaagccaactccacctgaccaggagacagaggaggagcagyggtttcgggctctgtttgaacaagtcgctggtgaggtaggacatgccccacttccatctccccaccaggctgagggcctggacctgcttcctagcaaagg

SEQ ID NO: 21677 - DNA, 201 bp, Homo sapiens
atgtgttacctcccatggtgatgtttataacccagtgatatggtgaaaagctttatctgtagttgtgagtaactccagtaagcagtgtgcatatgcataartgcgtgtgtgtttgtgtgtgtgtgtgtatttggagtgtcggaatccctgaaatattacctagcatgtaactataggattctctctgatggtcactgacca

SEQ ID NO: 21678 - DNA, 201 bp, Homo sapiens
tgcttattttcttatcattcatctgtgcatgggatgctaggatgaagaaagttcagtaatagttccatgagcacctttgaggactactctttaccattcaytctgctagatgctgaagatgcctaagacttggctcctgcctctagggagatccaagtctagagagaaacccatttttagattcatatggactaatttctt

SEQ ID NO: 21679 - DNA, 201 bp, Homo sapiens
tttgagacggagttttgttcttattgcccaggctggagtgcagtggtgcgatctcgtctcactgcaacctctgcctcccaggttcaagtgatactcctgcytcagcctcccaagcagctgagagtacaggcatgcgccaccacgcccgactcattttgtatctttagtagagatggggtttcaccgtgttggccaggctag

SEQ ID NO: 21680 - DNA, 201 bp, Homo sapiens
caggcagagcctgagggcacacaggctcaagggtgattgaggtgaacagcaggaatcctcacagacacctgaaataaggagaatattgggtctagaagacrtaaaagctgtttttgtttattgttgtgtttaaatccccaacatgtgcttattttcttatcattcatctgtgcatgggatgctaggatgaagaaagttcag

SEQ ID NO: 21681 - DNA, 201 bp, Homo sapiens
taagcacagagacacccatccctccccaaccccaccagtggaatcaggaatttacatctgtgatgagaggcaggagttagggatgcagcttcaaaaggtgrtctttaggccaggcacggtggctcatgcctgtaatcccagcactttgggaggccgaggcaggaggatcacctgaagtcaggagtttgagaccagcctggc

SEQ ID NO: 21682 - DNA, 201 bp, Homo sapiens
ccgaagagttgatgttacttgaatttttacacatccaaaatataatttatgccaaatgcatgaggataaaacattctgactgctacagtttctggttagtygataactagaagtcttttactttcactctctctcctctaaaacccttctcaaatgcattggcccttgtccctgctcccaggcagagcctgagggcacaca

SEQ ID NO: 21683 - DNA, 201 bp, Homo sapiens
gagaatcacttaaaacccaggaggcagaggttgcagtgagccgagatcatgccattgcactccagcctgtgccacagagtgagactccgtctaaaaaaaawggtggtttttttggttctgattcaactttgtaatcttttaaaatgcaccccctccccagtgcctaccactcaataggctgaatggtctccaacagatatg

SEQ ID NO: 21684 - DNA, 201 bp, Homo sapiens
attttgcttcctctcccccctacaaggaactcacctgccctgaacctttcaaattaaatgagcccctttaatggtgagccacaagccacatcttggactcygaagagttgatgttacttgaatttttacacatccaaaatataatttatgccaaatgcatgaggataaaacattctgactgctacagtttctggttagtcg

SEQ ID NO: 21685 - DNA, 201 bp, Homo sapiens
tcctaggtctccctagaagtcaaggagttaagttaacttctagggaatacaccatgcttctttgtaaagccaattgaacctcttttctttgtaaattagtsttaggtatttctttatagcagtacaagaacagcctaatacagaaaattggtacagaagagtggggcattgttataaagataactgaaaatgtggaagtga

SEQ ID NO: 21686 - DNA, 201 bp, Homo sapiens
cgttggactctttgggattctttagaatgttagctatttgtgttggctcctttgtcctccttcaccatccatagatgacttgcagattgctcactcaagcrggcatgtgatgtttctaggttagatcttctacgtattccacgtaacaacagaaacctctcatcatcttggtttgcttgattttgcttcctctccccccta

SEQ ID NO: 21687 - DNA, 201 bp, Homo sapiens
tagggtatctggaagaagaaatgtctaagcagcaaagcattcaggatgtgacctggctgcttctaacaacctatactcagatatgggagcaaagatatgasttaaagctggaatatatacatttaaaagggaagcagggcataaaaatttggaaaatttgcagcctggctatatagcagagaaagaaaaagctttttcgag

SEQ ID NO: 21688 - DNA, 201 bp, Homo sapiens
cctatgattttcttgataacatttcttttctctggcttatttattgtaagaatacagtatataatataaataattataaaacatgttaattggttctttaygttatcgataagacttctggtcaatggtaggctattcggagttcagctttagggaatacaagattttttgacaatgcaggagggttggcaccccaacccc

SEQ ID NO: 21689 - DNA, 201 bp, Homo sapiens
aagcctgcaggcacacagagtgcaagactgaatgaggcttggcagcctccacctagatttcagaggatgtatggaaaagcctgcatgcctaggcaaaagcytgctgcagggacagagccctcacagagaacttctactagggctatgcagatggggaaatgtgaggttcaaggtctcgcacagagtccccactggggtact

SEQ ID NO: 21690 - DNA, 201 bp, Homo sapiens
gataacttgcttcccgtcttccttccacaccacccagccagggcaagccctgggagatgcttcaggcttagttagaaaagctctgaaagcagggtgccccrgtggcctccctaggtccctgactctctcctctctctcttgccacccttgcaggctaaatgggagctatgaagctctgaagggaggcagcgccatcgaggc

SEQ ID NO: 21691 - DNA, 201 bp, Homo sapiens
ggtactgcctagtggaactgtgggaaggcggccatcatcctccagacccaagaatggtggatccactggcagcttgcaccttgagcctggaaaagccacaggtactcaacaacccatgacagcagccaaagtcacagggacagagcttcccaaggccttgggatcccaccctttgtaccagtgttccctggatgtaggaca

SEQ ID NO: 21692 - DNA, 201 bp, Homo sapiens
actcccattgtattttggaagtataaaatggaatttgtatatcttggaacttgattttgatttgacaggctcataggtgatgggacttgccttatctcagrtgagactttggactttggaattttgagttaatgctggaatgacttaagactttgggggttattgggaaggcataattatattttgcagtgtgagaaggac

SEQ ID NO: 21693 - DNA, 201 bp, Homo sapiens
taatgttagaatgtttcatcactccaacaagaaaccctttacccattaacagtgttaaccctgtacccatttcccccagccccaggcaaccactcatctaytttctctatagattctatttacatattctgaatattttatataaaaggaatcataggccgggtgcggtggctcacgcctgtaatcccagcactttgggag

SEQ ID NO: 21694 - DNA, 201 bp, Homo sapiens
acttgcttcatgtcactgctaaacatcctaggggagccccgtgcatagcccacgcacatggcctgcacctggggcagcagaaggggctggaggttgtgacygggccaggcatgtagctgggtctgatccagcaggggaggcttgacttagacggtgggtgtgactctgctctttccatgttttagaccagaagtgctgcag

SEQ ID NO: 21695 - DNA, 201 bp, Homo sapiens
cttctatgagattctagagaaggctttgaagagaggctccctgctgggctgcttcattgatgtaagttgctcatgggctcccattccaggcactatgctgrggctgcatagtgcattccaggcactatgctggggctgtaccaggtaccccagccacacccaaggaggggcataactcttgggggcagtgtttattcctgc

SEQ ID NO: 21696 - DNA, 201 bp, Homo sapiens
gggggtgtggcagagaccttccaaactaaagaggcccccgagaacttctatgagattctagagaaggctttgaagagaggctccctgctgggctgcttcaytgatgtaagttgctcatgggctcccattccaggcactatgctggggctgcatagtgcattccaggcactatgctggggctgtaccaggtaccccagccac

SEQ ID NO: 21697 - DNA, 201 bp, Homo sapiens
catgcatacatgtgctcaaacacacacgtgtgtagaagcacttgcaaacacatgcatgcacacatacatgcacacacatgcacacatgtgagcaaacacaygctttcacacatgcaatgtataaataaaccacaaacagtgcacatacctgtcatgcctgcctgtatgcacatgtatacacatgtgtgcgcacatgcattc

SEQ ID NO: 21698 - DNA, 201 bp, Homo sapiens
tggagcagggcttggcctctgggggacccagtgaacctagagcagaggggatttaaaatggtgcagcaggctgcaggctataggctagaggaattgtattyggacaggggagaagggaaaacagcatcatgctattccgatgcttacgggagtaccaccgtgcttccacccaagacgaaaaggaagacaaaagggagaccg

SEQ ID NO: 21699 - DNA, 201 bp, Homo sapiens
ttcccagccagcaattcctccctgttctacagtgagaggccgcagatcccctttgtgtggaaacgaccaggggtgagtggggcgagcaggggaaggagcayagatgaggccgaggttcagcagcccccgcaggaagtggaaacaggggtgctggggaggggccggctacgctcagtgcaactgaggtgcatcatcccagtc

SEQ ID NO: 21700 - DNA, 201 bp, Homo sapiens
actctgccgaccacaacgagttctggagcgccttgctggaaaaagcctacgccaagtgagtgacagcttccccagctcaggcagcctcccgacaggagtctctacactagtctttgtagtgagcatctaagggctgggaaaaaatcagggctctgggtttgcaggtgaggctcggcaggacccaaccctctcagggctcaa

SEQ ID NO: 21701 - DNA, 201 bp, Homo sapiens
catccccttctgacacagagttttcctatttgctgtgaaatagcaatgaaaattgtgatttatggcttccattttgcaggagactgctggctattagccgycatcgcctcccttacgcttaatcaaaaagcactggccagagtcatcccccaggaccaaagctttggccctggttatgccgggatattccatttccaggta

SEQ ID NO: 21702 - DNA, 201 bp, Homo sapiens
tgcaggtgaggctcggcaggacccaaccctctcagggctcaagcggggttggaggtggttttcctgtcgtagcctagatgtgcccatctttgggagcagtsgctacattcatgaccctttttctccctgggccatgaatctggcctttggaagagctgggaaggcaagcggaggggaattctggctgtgccgacagcactt

SEQ ID NO: 21703 - DNA, 201 bp, Homo sapiens
cgaaccacttgggtggcagctatgaaatgtctgctcgcccagcccgtgctgacactgatgtatgcagtcttggtcctctggaaagggagttgctggaattyacagagctgatgcatcaggcagccatatgtctgaaacccaagtaagcatgtcctataacagtgccaagaaggcaacagctgtttatgatagacgggcaga

SEQ ID NO: 21704 - DNA, 201 bp, Homo sapiens
aggcaagcggaggggaattctggctgtgccgacagcacttagtgcttcacacttccctcggacactggcatggctcaaacatctgggctattacgcacgtkgatatagagacatcaattgtccgtcctacgggatgcttcttttttatttttaaaaagtcgtatatgacatatcgataaataatcgtatatgataaaatgt

SEQ ID NO: 21705 - DNA, 201 bp, Homo sapiens
gctgagtctgggttggggctgcagggagatttctaaccaccctcccaagtactgccgaaccacttgggtggcagctatgaaatgtctgctcgcccagcccrtgctgacactgatgtatgcagtcttggtcctctggaaagggagttgctggaattcacagagctgatgcatcaggcagccatatgtctgaaacccaagtaa

SEQ ID NO: 21706 - DNA, 201 bp, Homo sapiens
ccagaaagggccatattacaatgtcccaagcccagtgacatacggtgctttccagaaatgtgaactcagaaactgccaagctgagtgtgatgggcttttakgttctgatgacgttgatgttgtctactgaaaacaagtgaatctggataaaggtgattcggataaatggatcctcccagatatctgcttacacaggcggca

SEQ ID NO: 21707 - DNA, 201 bp, Homo sapiens
tcggacactggcatggctcaaacatctgggctattacgcacgttgatatagagacatcaattgtccgtcctacgggatgcttcttttttatttttaaaaartcgtatatgacatatcgataaataatcgtatatgataaaatgtatatgacataaattttaccatttttaagtgtgcagttgagtagcattaagtacatcc

SEQ ID NO: 21708 - DNA, 201 bp, Homo sapiens
acagccagaaagggccatattacaatgtcccaagcccagtgacatacggtgctttccagaaatgtgaactcagaaactgccaagctgagtgtgatgggctyttaggttctgatgacgttgatgttgtctactgaaaacaagtgaatctggataaaggtgattcggataaatggatcctcccagatatctgcttacacaggc

SEQ ID NO: 21709 - DNA, 201 bp, Homo sapiens
ctgtttgaggatgcagacttcccagccagcaattcctccctgttctacagtgagaggccgcagatcccctttgtgtggaaacgaccaggggtgagtggggygagcaggggaaggagcatagatgaggccgaggttcagcagcccccgcaggaagtggaaacaggggtgctggggaggggccggctacgctcagtgcaactg

SEQ ID NO: 21710 - DNA, 201 bp, Homo sapiens
gtgacacctctcagaaagccagaaccagggcgattcggaattagctttcccgatgttcagccctggcgagtctctcttgcctgtgtcaaacagccagaaarggccatattacaatgtcccaagcccagtgacatacggtgctttccagaaatgtgaactcagaaactgccaagctgagtgtgatgggcttttaggttctga

SEQ ID NO: 21711 - DNA, 201 bp, Homo sapiens
tctgtgctccagctaaggctgggggtggcttgtactctgctggtgacacctctcagaaagccagaaccagggcgattcggaattagctttcccgatgttcrgccctggcgagtctctcttgcctgtgtcaaacagccagaaagggccatattacaatgtcccaagcccagtgacatacggtgctttccagaaatgtgaact

SEQ ID NO: 21712 - DNA, 201 bp, Homo sapiens
aaagggagaccgacttcttttggaaggcccagtccaactgtggcctctgcggcccctagagggtagctcccccgggctggctgtcacccatttactgccaycagcgatgcctttcaggcacgctccttctcaaggcttctgctctccaccctttagaaccttttccttcggtttgatgctgacaagtccggcaccatgtct

SEQ ID NO: 21713 - DNA, 201 bp, Homo sapiens
atgttataaagaataacaagaaaatgaacagccgtgatctgttgccacccacaataagaactagaacatctggtcatgtagagtgctcacacctgtaatcrcagcgctttgggagggggaggtgggaagatctcttgagcccaggagttttagactagcctgggcaacatagcaagaccacatctctatcaaaaaaaaaaa

SEQ ID NO: 21714 - DNA, 201 bp, Homo sapiens
ggacacaagatgagaggagaagcagggtgctgagaagcctgaggaagacaattcaaagcagaggtctctcggggaaggcggcgcagcttgagctccccacrtggcgtccgcccagacactgctggaaccttccacctccagcccaggcccctcctcagtcctggtgcctggaaaagtgggaagaggtgggaaaaatccttc

SEQ ID NO: 21715 - DNA, 201 bp, Homo sapiens
ggcccggcttcctccctccctccctccctccctccctttgtttaggtctgtgctcctctgcttcccccagagacgcctcccctgctgactgctgtagctasccttgccccatcccaccccttccctctccatcctcgctcttttctctcctggtttatggtttgtctcttcctcaaatgcaatttgcaaaactctcctgaa

SEQ ID NO: 21716 - DNA, 201 bp, Homo sapiens
acaactcacttactttttgtcaaagttagaattctccaagataaaagctggacgcacaaaccagcatggagggcatctttgtctcccccttcagaagtctyccctcctgggaccagggccaccaaggcctgcccagcgactctagagtcccagatctctgctccaaggggctgtcttccttagtattatctcctctggcat

SEQ ID NO: 21717 - DNA, 201 bp, Homo sapiens
atggcttccattttgcaggagactgctggctattagccgccatcgcctcccttacgcttaatcaaaaagcactggccagagtcatcccccaggaccaaagmtttggccctggttatgccgggatattccatttccaggtaagagggagccctgggccagtgggtttacctctctggggcccggcatgagggcaggtgcatt

SEQ ID NO: 21718 - DNA, 201 bp, Homo sapiens
gcggacaggaacaagatgatttaatgaataagtgaatgatttaatgaatgagtgaatggatgatgccctcactcttgccctcctgtgcatcgtgtctctcmgctttgctgcaggatggcatttcaggacttcaaggcccactttgataaagtggagatctgcaacctcactcccgatgccctggaggaagacgcgatccac

SEQ ID NO: 21719 - DNA, 201 bp, Homo sapiens
catccttagccagcagaatagtcttcttcacagaaaataacccaaagctgggggacccccatgctgaaattggatcagaatcaagatgcacaagactgccyagtggtgggggtggggagcttttgaagggacttgggggtcttcttgccactttgggatcccatccaagggaacagagttctgtttttgtgaactttccgg

SEQ ID NO: 21720 - DNA, 201 bp, Homo sapiens
ctagtggtgggggtggggagcttttgaagggacttgggggtcttcttgccactttgggatcccatccaagggaacagagttctgtttttgtgaactttccrggaccacccccattccacttctgccgtttcccctcttcagagatttgtggtttaatcattaaaaccacttccccagggccccaaacctgtgcacccaggc

SEQ ID NO: 21721 - DNA, 201 bp, Homo sapiens
tgagccaagattgtgccactgcactccagcctgggcgacagagtgagactccatcaaaagaaagaaggaaagaaggaaaagaaagaaaagaaagaaaaatragaaagaaagaagaaagaaagaaagaaagaaagaaagaaagaaagaaagaaagaaagaaagaaagaaagaaagaaagaaagaaaggaaaaacaagagaga

SEQ ID NO: 21722 - DNA, 201 bp, Homo sapiens
attctccaagataaaagctggacgcacaaaccagcatggagggcatctttgtctcccccttcagaagtctcccctcctgggaccagggccaccaaggcctscccagcgactctagagtcccagatctctgctccaaggggctgtcttccttagtattatctcctctggcattgccccaaacgctgggtgaggccttcatcc

SEQ ID NO: 21723 - DNA, 201 bp, Homo sapiens
tgccactgcactccagcctgggcgacagagtgagactccatcaaaagaaagaaggaaagaaggaaaagaaagaaaagaaagaaaaataagaaagaaagaaraaagaaagaaagaaagaaagaaagaaagaaagaaagaaagaaagaaagaaagaaagaaagaaagaaagaaaggaaaaacaagagagacccctaggtccac

SEQ ID NO: 21724 - DNA, 201 bp, Homo sapiens
tactgtgttgctgtcgttcccacagactcattttcagaatctgttctgccttttcctttgtctgcaactgaagattgtccctttggtctggtcctcattcycgtacccctatctgtttcttatttaggggagttaggagctttacatcatatcttacagatttctgtaaaatcaggaacaaaagggctgaggatgagcatg

SEQ ID NO: 21725 - DNA, 201 bp, Homo sapiens
ggaaaagaaagaaaagaaagaaaaataagaaagaaagaagaaagaaagaaagaaagaaagaaagaaagaaagaaagaaagaaagaaagaaagaaagaaagwaagaaagaaaggaaaaacaagagagacccctaggtccacctttatttatcatttactttaaggtaaatgataagtaatgtcactaaaaaacatgaggaag

SEQ ID NO: 21726 - DNA, 201 bp, Homo sapiens
aaagaaagaaaaataagaaagaaagaagaaagaaagaaagaaagaaagaaagaaagaaagaaagaaagaaagaaagaaagaaagaaagaaagaaagaaaggaaaaacaagagagacccctaggtccacctttatttatcatttactttaaggtaaatgataagtaatgtcactaaaaaacatgaggaagtgtgatggctgc

SEQ ID NO: 21727 - DNA, 201 bp, Homo sapiens
tgataacttgcttcccgtcttccttccacaccacccagccagggcaagccctgggagatgcttcaggcttagttagaaaagctctgaaagcagggtgcccyagtggcctccctaggtccctgactctctcctctctctcttgccacccttgcaggctaaatgggagctatgaagctctgaagggaggcagcgccatcgagg

SEQ ID NO: 21728 - DNA, 201 bp, Homo sapiens
caccttctaaaagagccttcatgagaaaatgttcctcacgctacaggacgcagcttgtgcacaccgcctcaggagggtgacatggggctgggcacacaggstcctggcttctttcctgctatttttgtcatgtttcttttttgtggatcattttgtgcaagtttctttggctgttttttagcctccaaagccaactccacc

SEQ ID NO: 21729 - DNA, 201 bp, Homo sapiens
gtgattttcaaagctgtctatgggtagcttggtcagaggggaaaaaagcaacaggatcaacatttacaaacagggcctggagctcccatgtagctgactcrcatcatttctgtctttttcctgggcaacagttctggcagcacagtgagtggctggacgtggtgatcgatgaccgcctgcccaccttcagggaccgcttgg

SEQ ID NO: 21730 - DNA, 201 bp, Homo sapiens
tgccgaccacaacgagttctggagcgccttgctggaaaaagcctacgccaagtgagtgacagcttccccagctcaggcagcctcccgacaggagtctctayactagtctttgtagtgagcatctaagggctgggaaaaaatcagggctctgggtttgcaggtgaggctcggcaggacccaaccctctcagggctcaagcgg

SEQ ID NO: 21731 - DNA, 201 bp, Homo sapiens
gctccacaggtccagctaataaagtccttctagtctcaccttctaaaagagccttcatgagaaaatgttcctcacgctacaggacgcagcttgtgcacacygcctcaggagggtgacatggggctgggcacacaggctcctggcttctttcctgctatttttgtcatgtttcttttttgtggatcattttgtgcaagtttc

SEQ ID NO: 21732 - DNA, 201 bp, Homo sapiens
acacctgactaacactaccttagccaggtgatcaaggccagcatcagctgtggtaaggcatgtggacggcaggtactcttgatatcatgagatgagagggsagctttacctctccggtcttccttccactaaccaatagccccactcttttttttattattatttacttttttttggagacagggtcttgctctctcaccc

SEQ ID NO: 21733 - DNA, 201 bp, Homo sapiens
tcccccatgtatgccatattctagatacaatgtagacttttcaaaaggtttacattcaggtggtccttctccaggagatcctccctgccgctgcccacctstccccctcttcctctgcctcccttcccctcgaccccgtagtcctccattgctatccaataggaaatcattctactggctcctttgtttttcaaagttttg

SEQ ID NO: 21734 - DNA, 201 bp, Homo sapiens
ggggcagcagaaggggctggaggttgtgaccgggccaggcatgtagctgggtctgatccagcaggggaggcttgacttagacggtgggtgtgactctgctytttccatgttttagaccagaagtgctgcagaatctgaggcccggacgccgtttggtcttattaagggtcatgcctacagtgtaacgggaattgaccaggt

SEQ ID NO: 21735 - DNA, 201 bp, Homo sapiens
cacctggcctgtatccttcccagctctctatctgctcgtacaaacaggcacacacttccacacacaaacatcaaggtcagttggtttgattttactgaaaygggatcttcctatctagttttctgaaatttgttttttttttttcatttcatgtactatgaaaaaaatagcagatagaagtctaatgatattttttaaaat

SEQ ID NO: 21736 - DNA, 201 bp, Homo sapiens
aacctgagtgcacctcaagtcactcaaattgggtcctgcattttaggacttaatccaactgggctgggtttacctttgttctatctatgaaagacagagaragtgagagagcgagagactttcttttaaaaaataccagtgaaatcagcctagagaacaaaccactgcaagcttgtgtggaccctgacttatttctagctg

SEQ ID NO: 21737 - DNA, 201 bp, Homo sapiens
tgtatccttcccagctctctatctgctcgtacaaacaggcacacacttccacacacaaacatcaaggtcagttggtttgattttactgaaacgggatcttyctatctagttttctgaaatttgttttttttttttcatttcatgtactatgaaaaaaatagcagatagaagtctaatgatattttttaaaattttctctat

SEQ ID NO: 21738 - DNA, 201 bp, Homo sapiens
aggacccaagaggcacggggctgggggaacaacactgcttcggcctctgcttcctcactccctctgaatggagtccagtggcctcaagcccctgcacctcygttcctctagagtcagacatgcctgtgatgtggggctcacagccccggagtttacagaggaaagtgacacccagcagcgttggtcgggctctcctacacc

SEQ ID NO: 21739 - DNA, 201 bp, Homo sapiens
tgctcgtacaaacaggcacacacttccacacacaaacatcaaggtcagttggtttgattttactgaaacgggatcttcctatctagttttctgaaatttgttttttttttttcatttcatgtactatgaaaaaaatagcagatagaagtctaatgatattttttaaaattttctctatgcatacaaacacacacacttata

SEQ ID NO: 21740 - DNA, 201 bp, Homo sapiens
acgtgtgagacctggcagaggacaggccagcatttgggaggtccttacttctgccgggcctggggttttggcgcatctaaaaacaccccgtgttcttcagmaattctcctggccaagctttcttgagtattttagacactaatgccacacatagctctccctgggcaggcgcccctggtgtctgtcactcctccaggttgt

SEQ ID NO: 21741 - DNA, 201 bp, Homo sapiens
caggcacattctgcaacaagcccagaatgtctaagctggtgacagatgaggatgcagccgtgagaagttaaatggcccaccctgaaccctactgctgagcsgggcaggctattcctgggactctattgaggcccactgacatggtcctggtttgcattgtccttctgggctcagctcagagccacctgcaaactcctgcgc

SEQ ID NO: 21742 - DNA, 201 bp, Homo sapiens
gcattgcttgccagggctatcccctggcaggggctgggcaatcaagacagggagggcttgggggactcctgggtttcccttcgggcaggcacattctgcarcaagcccagaatgtctaagctggtgacagatgaggatgcagccgtgagaagttaaatggcccaccctgaaccctactgctgagcggggcaggctattcct

SEQ ID NO: 21743 - DNA, 201 bp, Homo sapiens
gagcaacacaggcttgaacttatatggggattttcttccatctctaccacccctgagacagcaagaccaactcctcctcctccttctcagcctactcaacrtgaagataataaggatgaagacctttacaatgacccagttccacttaataaatagtaaatgtatttcctcttccctatgattttcttgataacatttctt

SEQ ID NO: 21744 - DNA, 201 bp, Homo sapiens
ggtagcgggccatagggaaatcacaagcattgccaggttccctgcagacctctgtggcttgggcatcatttgcagtgggactcagcattacacggtgcacrtctcagcagcccgtgggaccgtggggctggacggccctcctcctcagcaccaccttcttgtcaaacacagctgtgcttggggagggtgggcagagcacaa

SEQ ID NO: 21745 - DNA, 201 bp, Homo sapiens
ttcttccatctctaccacccctgagacagcaagaccaactcctcctcctccttctcagcctactcaacatgaagataataaggatgaagacctttacaatkacccagttccacttaataaatagtaaatgtatttcctcttccctatgattttcttgataacatttcttttctctggcttatttattgtaagaatacagta

SEQ ID NO: 21746 - DNA, 201 bp, Homo sapiens
ccttcactcctctgcaggccccggcccagttaactcaccacccctgcagggtgagccagaacgtgcctcgctgccacaggattggctgttacctctcccgrgaccggcccggcttcctccctccctccctccctccctccctttgtttaggtctgtgctcctctgcttcccccagagacgcctcccctgctgactgctgta

SEQ ID NO: 21747 - DNA, 201 bp, Homo sapiens
ttttcctggctgagttggcctcacctgcaatcactttcctaaaaaggcctgtgcacctttcattacagtagctctcatactatatacactgtgcccaggarggaggacagagaagggagaaaaaaaccatctcatataatcacgttgccccaagtcaccatgctgtaataaacaagctgttgggaaggaggaggcagggtg

SEQ ID NO: 21748 - DNA, 201 bp, Homo sapiens
ataaatagtatctcaaaaatattagctattttgttataatcactcccacagaaactaggcatttttcttctctagttttgtctttcaacttcagcatgtargacacatgtaataactatacctcctttgatcaatccaagattccaaagaaagatgtgcacacacaaattattcttttatgaaaataagaggaagctgggc

SEQ ID NO: 21749 - DNA, 201 bp, Homo sapiens
tcatcccccaggaccaaagctttggccctggttatgccgggatattccatttccaggtaagagggagccctgggccagtgggtttacctctctggggcccrgcatgagggcaggtgcatttccacactgcctggtaaccctagaaaaaaatgtcatcagatctgtgtgacatatggtcctaaaccatgctaaagccacatt

SEQ ID NO: 21750 - DNA, 201 bp, Homo sapiens
agccaattacgtattattacggtgagccaaatggggatactattggtacttagctcacagaattattgtaatggcttaattgattacttcataaatagtakctcaaaaatattagctattttgttataatcactcccacagaaactaggcatttttcttctctagttttgtctttcaacttcagcatgtaggacacatgta

SEQ ID NO: 21751 - DNA, 201 bp, Homo sapiens
acgcttaatcaaaaagcactggccagagtcatcccccaggaccaaagctttggccctggttatgccgggatattccatttccaggtaagagggagccctgrgccagtgggtttacctctctggggcccggcatgagggcaggtgcatttccacactgcctggtaaccctagaaaaaaatgtcatcagatctgtgtgacata

SEQ ID NO: 21752 - DNA, 201 bp, Homo sapiens
tggagcagcttccccacaggctccactggaaggccctttggtcgctgggaaacaaacttggtaaaggaattgtctttaaaaggatgcctttcccccttctytcctatcaggggtgttccaggctctcagtacaaagaacaaggagttcattcatctcaatataaatgaggtatggccaatccagaccctctgctcagggac

SEQ ID NO: 21753 - DNA, 201 bp, Homo sapiens
catggcgagagggaggttgagtcactgggacaggcaagcaactgcagcatggggtccctgaggacccaagaggcacggggctgggggaacaacactgcttyggcctctgcttcctcactccctctgaatggagtccagtggcctcaagcccctgcacctccgttcctctagagtcagacatgcctgtgatgtggggctcac

SEQ ID NO: 21754 - DNA, 201 bp, Homo sapiens
aggaaatcgtgaaaaacccagaattcattcttggaggggccaccaggactgatatctgccagggagagctgggtgagtgtaagtggatggagcatggcgaragggaggttgagtcactgggacaggcaagcaactgcagcatggggtccctgaggacccaagaggcacggggctgggggaacaacactgcttcggcctctg

SEQ ID NO: 21755 - DNA, 201 bp, Homo sapiens
ccaggaaatcgtgaaaaacccagaattcattcttggaggggccaccaggactgatatctgccagggagagctgggtgagtgtaagtggatggagcatggcragagggaggttgagtcactgggacaggcaagcaactgcagcatggggtccctgaggacccaagaggcacggggctgggggaacaacactgcttcggcctc

SEQ ID NO: 21756 - DNA, 201 bp, Homo sapiens
gcaggggaaggagcatagatgaggccgaggttcagcagcccccgcaggaagtggaaacaggggtgctggggaggggccggctacgctcagtgcaactgagktgcatcatcccagtctaccgtggaaagctttgcagtttggaggcagaaaataatgtacaggcctgggatgctctgcggtggggacccggggcatctggtt

SEQ ID NO: 21757 - DNA, 201 bp, Homo sapiens
atccatggcccctgagcttctggggaaatctgaagctagtctagaacttggttaaaactgagccagtgtttgtcttcagtccagacacagctaccaggtcrccagacatggtgcagccgctgctgtattagccagaccccagcgtgagggcagggcacacaggcctgtgctttccaggctgtcatggtccccatggaggct

SEQ ID NO: 21758 - DNA, 201 bp, Homo sapiens
aactttccagtggagacacctgactaacactaccttagccaggtgatcaaggccagcatcagctgtggtaaggcatgtggacggcaggtactcttgatatsatgagatgagaggggagctttacctctccggtcttccttccactaaccaatagccccactcttttttttattattatttacttttttttggagacagggt

SEQ ID NO: 21759 - DNA, 201 bp, Homo sapiens
gctgggtgagtgtaagtggatggagcatggcgagagggaggttgagtcactgggacaggcaagcaactgcagcatggggtccctgaggacccaagaggcayggggctgggggaacaacactgcttcggcctctgcttcctcactccctctgaatggagtccagtggcctcaagcccctgcacctccgttcctctagagtca

SEQ ID NO: 21760 - DNA, 201 bp, Homo sapiens
tggcaaagatagaccacagagagccatggtctgatgtgtgtggacccatgggcctgtgcggttagctaaggagcagaatgtgccagcctcccctgcagcaygtttcttagcatcgcctttctttatacattcacagtgcctctgtgggaggatgatgggctggggcaggtttgtgccttgtgtttgaggaaaggttcaatt

SEQ ID NO: 21761 - DNA, 201 bp, Homo sapiens
atgccaggtactgcctgtgggcaacctgagcagatggcaggtcttctctctgctgcccaggaggtgggcctctgagcccagttggtgattcttaaggtcayggcccttggagtggtggcaccagggttcagacccaggactcacttcctgacaccagggccctcattttaaaccactgtgaacattggtagaaacttttta

SEQ ID NO: 21762 - DNA, 201 bp, Homo sapiens
ccatcagcgatgcctttcaggcacgctccttctcaaggcttctgctctccaccctttagaaccttttccttcggtttgatgctgacaagtccggcaccatrtctacctatgaactacggactgcactgaaagctgcaggtaaagaaaagactggagtacaggtggctgactgcatgccaggtactgcctgtgggcaacctg

SEQ ID NO: 21763 - DNA, 201 bp, Homo sapiens
gcagaggggatttaaaatggtgcagcaggctgcaggctataggctagaggaattgtattcggacaggggagaagggaaaacagcatcatgctattccgatrcttacgggagtaccaccgtgcttccacccaagacgaaaaggaagacaaaagggagaccgacttcttttggaaggcccagtccaactgtggcctctgcggc

SEQ ID NO: 21764 - DNA, 201 bp, Homo sapiens
ggagggcccccatccttgcagtctatattgacatcatctagtttaaagtgtaatctgtactctacaactcacttactttttgtcaaagttagaattctccragataaaagctggacgcacaaaccagcatggagggcatctttgtctcccccttcagaagtctcccctcctgggaccagggccaccaaggcctgcccagcg

SEQ ID NO: 21765 - DNA, 201 bp, Homo sapiens
aaacaattgtctccacttcaacaggacatggaggtgacagcagaggaacttgagtatgttttaaatgctgtgctgcaaaagagtaagtgccaaccccatcrgggtcctggggcacctatggagggacaagcgaccacactgcctgggtcccctccctgctcctccgagccgcagatctgcttcccagggctgatttgtagg

SEQ ID NO: 21766 - DNA, 201 bp, Homo sapiens
agagtttgagaggctacctgaggtcaggctagtggaaagaaggtctggtgcagacggtgggagaagccgggcagaggaaactcggaaattcacagcaggargctccacaaagaagagcgtccatgtgagtgatccattgccctgcccctcttgaaggagcagccccaacaccagggctgagcctgcccaaggtgatgggtg

SEQ ID NO: 21767 - DNA, 201 bp, Homo sapiens
caaggccattgttgctcttcatcatgacctctgcctgaacaccaattttgtttactcctagttctccggagtggcgttctgttggtccagctgagcagaarcgtctgtgtcacactgctctggatgatggggaattctggtaccgtgcttgttcctgtgttaactgcagatacgagcaagtcccatggccctggggcgtaa

SEQ ID NO: 21768 - DNA, 201 bp, Homo sapiens
atgaataagtgaatgatttaatgaatgagtgaatggatgatgccctcactcttgccctcctgtgcatcgtgtctctccgctttgctgcaggatggcatttmaggacttcaaggcccactttgataaagtggagatctgcaacctcactcccgatgccctggaggaagacgcgatccacaaatgggaggtgacggtccatca

SEQ ID NO: 21769 - DNA, 201 bp, Homo sapiens
taggaatgggccctggcagagtatcattctccgtgggcagcagcatcccctccaagaaactttctagggccacagctggaagtgacctgagacatagaacrcgaggggaggctggtgtaggaatgaacttggggctcagacaccacccagtgttaagttcccccaaacaaagcttcctgtaaagtcagcgagactctatgg

SEQ ID NO: 21770 - DNA, 201 bp, Homo sapiens
agtggctcacgcctgtaatcccagcactttgggaggttgaggcagttggatcgtgaggtcaggagctcgagaccagctcatagcgaaactttgtctctackaaaaatacaaaaaattagtcaaatgtggtggtatgcacctgtaatcccagctactcgggaggctgaggcaggagaaccccttgaacctgggaggtggagg

SEQ ID NO: 21771 - DNA, 201 bp, Homo sapiens
cagcagggtcctgaaggctggtctgtcactggagccaaatgaagctcagaactgatttaaaacaaaaataaactataaaagaaggtgccaagggctataamaaacaattgtctccacttcaacaggacatggaggtgacagcagaggaacttgagtatgttttaaatgctgtgctgcaaaagagtaagtgccaaccccatc

SEQ ID NO: 21772 - DNA, 201 bp, Homo sapiens
gaagctgggaaaccactgccttgccctgcccagcttttcatgcgctttcctgggttgggatgtctctcaagttaggctctctcctagttgggctggcatgyccctaaaacatgtgacatatgagacacatagctgcagctacacaggagataggtacatctgcccacagcagggtcctgaaggctggtctgtcactggagc

SEQ ID NO: 21773 - DNA, 201 bp, Homo sapiens
tccacctgaccaggagacagaggaggagcagcggtttcgggctctgtttgaacaagtcgctggtgaggtaggacatgccccacttccatctccccaccagsctgagggcctggacctgcttcctagcaaagggttgcagtcgtggggttggtcagcaacgtcatcctgaggcatgatggagcttgttgcaaagtaagacca

SEQ ID NO: 21774 - DNA, 201 bp, Homo sapiens
ccaaagtgctgggattacaggagtgagccaccacgccaggctgcaggacactttcttagcttatctgcaaggcaaggcacatatcccttctagctctgctcctcgctccctcaagcaaaccattgaaaagttgctgttttctactggtcccagagtcatgctcacaagacattcttgggtggagaccttcatttttcagac

SEQ ID NO: 21775 - DNA, 201 bp, Homo sapiens
tgggactcagcattacacggtgcacgtctcagcagcccgtgggaccgtggggctggacggccctcctcctcagcaccaccttcttgtcaaacacagctgtrcttggggagggtgggcagagcacaaagccaaggggacattggagggcagtggacagccaggcttgccctcaagggagcccagggcaaggagtgcactgag

SEQ ID NO: 21776 - DNA, 201 bp, Homo sapiens
gacttcttcagataccacgcttctcgggccagaagcaagacgttcatcaacctgagagaagtctccgaccggttcaagctgccccctggggagtacatcckgattcccagcacttttgagccccaccaggaagctgatttctgtctgagaatcttttcagagaaaaaagccattacccggtgagtcagaggaacagcttcc

SEQ ID NO: 21777 - DNA, 201 bp, Homo sapiens
ataaactccaaaaattagttgtgtattatttggactactatttcaatcattcagaaatttgttttaaaaaatccttgcagtcttgctgctgacttcatagygtgcagtagtgtgatatggagatgatgcactgtctttcagaagccttggctctatgccttctagctgggcctggggcaagtcatttagcctctgtggacc

SEQ ID NO: 21778 - DNA, 201 bp, Homo sapiens
ccttaagaaacgtcaaaggatggtgattggaaaagagaagaagcagcacacaagggttttgtcttagaagcatttattttatttatttatttattattacttttttttttttttgagatgcagtctcactctatcgcccaggctggaatgcagagaagcatgtatttaagcaccccagtcctcagctatgcagtgccccgc

SEQ ID NO: 21779 - DNA, 201 bp, Homo sapiens
acatgcagactgaattattctggtggtttttgttgttttgttttgttttgttttgttttgagacagagtcttactctgtcacccaggctagagtgcagtgrcacgatctcagctcactgcaacctccacctcccgggttcaagtacttctcccaccctagccccccgagtagctgggactacaggtgtatgtcaccacgcc

SEQ ID NO: 21780 - DNA, 201 bp, Homo sapiens
catgcagactgaattattctggtggtttttgttgttttgttttgttttgttttgttttgagacagagtcttactctgtcacccaggctagagtgcagtggmacgatctcagctcactgcaacctccacctcccgggttcaagtacttctcccaccctagccccccgagtagctgggactacaggtgtatgtcaccacgccc

SEQ ID NO: 21781 - DNA, 201 bp, Homo sapiens
gaggccttggtgggcctcacttgaggtcaggcattcaagaccagcctggccaacatggtgaaaccccatctttactaaaaatacaaaaattaaccaggcgkggtggcacgcagctgtaatcccagctactcgggaggctgagtcaggagaatcgcttgaacccaggaggcggaggttgcagtggcagcgagccgagatcat

SEQ ID NO: 21782 - DNA, 201 bp, Homo sapiens
aggtagtgtaataaagttatttctgtaggaaactgggaattcattggctatttgactctgaatgtaacctctttaaagctgatgaacgagtggccccttakatttgaagtggtaaggtagtcataagttaggctcccagacactggcattcaacgtgattttgaagtgtgatagaccatgtatacacttgattgtgcacca

SEQ ID NO: 21783 - DNA, 201 bp, Homo sapiens
ttgaactatatttttttctataatctagctcttagaactctattttcctttgatactaatgattcctcttgccctcagaaatgtttacatgaaacagcacrtgactgtcctttttgttgatcccaaaactttttattgttcattctagagaggcaaataatgtccttcagtgtcactaattgagtttttaaaaggaagatt

SEQ ID NO: 21784 - DNA, 201 bp, Homo sapiens
agcaaccactgatcagatgtctatcaccacagattagttttgtgtattctggaatcccctgttaattgcatgtatttttcttttcttttcttttcttttctttttttttttgttttggtgacaggatctcactctgttacccaggctggagtgcagtgtcacaatctcagctcgctgcaacccccacctcccagctttaag

SEQ ID NO: 21785 - DNA, 201 bp, Homo sapiens
cctctgcctccctggttcaagcaattctcttgcctcagcctccctagtagctggcacctgccaccatgcccagctaatttgggtttcaccatgttagccaggctggtctcgaactcctgacctcaagtgatccacccacctcgggcttccaaagttctgggattacctgcgtgagccactgtgcccagccaaggatatttt

SEQ ID NO: 21786 - DNA, 201 bp, Homo sapiens
tcaccatgttagccaggctggtctcgaactcctgacctcaagtgatccacccacctcgggcttccaaagttctgggattacctgcgtgagccactgtgccyagccaaggatatttttcttgtagtatctccattatcaaaacgtgctggaaaggatgttttacttgtttatcaatatggtgatgcctcaggagcttttaag

SEQ ID NO: 21787 - DNA, 201 bp, Homo sapiens
tttatgttcttaccagctttcaccctaattaaatggggcactacaccgcagagtttagcctgtggtgtagcagagcccaggtcatctgtcacagagaatcrtaatcttacattctctctctcctctgaacaatagaattttgaggtgggggagaatcttagtttataatgaggcaactctagttttatcacactcagaaac

SEQ ID NO: 21788 - DNA, 201 bp, Homo sapiens
cacttttttcctactggtaattcctgtttttctaattacacaaaatgtttaacttaaactattctttgcaatgagttttagctttcctcctctatcctaayttcaaaacctttaatttaagaaccatttaaaattaatccagtggtaaccagaagaatattttaggtatcatgaccacttaatcttgtgcctgattttagt

SEQ ID NO: 21789 - DNA, 201 bp, Homo sapiens
cattctgttaggttaccagtattttactgtcatgcacccatgggtagtagaaacaaaataaaaataaatataaatgtttaactttaggtgttggcaccaayatagattatgcataaactgttgcaataaaagatactcattgtgcctgtacctgaaaaatttaccttaggttttctctggccttttttgtttaggcctgca

SEQ ID NO: 21790 - DNA, 201 bp, Homo sapiens
gaaattatacatccttcgctttccccacaaaatgaattcagaatcgacattcaagtttataattttaagctgctaattataaaaatatattaataccttakggattgaagattacatgaaataagaactacaaaagaatgctaattaataacataactccatatgctatcaaacttctgatagcactgagtttcttataaa

SEQ ID NO: 21791 - DNA, 201 bp, Homo sapiens
tatattcttctcttggtgagtaaaattatattttccttggcatcaatgcattgagatctgaatatacctgtatctatcaatccttattacacatttcttaygcagtagcttcaaataggccaaaattggcctagacacaactaaaaattgagggtttgttacatgctttctaacagaaaggttttcaacgagattaattat

SEQ ID NO: 21792 - DNA, 201 bp, Homo sapiens
cctatgaagctgatccttccaactctaataaagcacagtctacccccagccgccactatacatctgcctcagcttacttggaattattttatccaaaaccrtcccctatatgtgggactagtctcaccaaagagacacttggcttatatgaggattccattggttaaagttggtgctaataaatacaagttatttgatctt

SEQ ID NO: 21793 - DNA, 201 bp, Homo sapiens
caattaactgatataaaaatatacctgtaataatatattttagtagcacttttgcaattgctacccttaaaaccatgtcaacacttccaatataatcctgwattttacaggtgttttaattctggagggggtggggattttttttttctaaaaataatttagaatacaaatttccagtctgagaaaaatattatttgaaga

SEQ ID NO: 21794 - DNA, 201 bp, Homo sapiens
ctcccgggttcaagtacttctcccaccctagccccccgagtagctgggactacaggtgtatgtcaccacgcccagctaatttttgtattctttggaagagwtggggtttcactgtgttggccagactggtcttgaactcctgacctcaagtgatccacccattttgacctcccaaagtgctgggattacaagtgtgagcca

SEQ ID NO: 21795 - DNA, 201 bp, Homo sapiens
gtgagattatatagacgtcattcagaatatttgtttttatccttcaactcgaagagttttctcacctctttattttcaagttgaaaacattattataagaktatgttagcgggtcatttgactctgaaaaaaatagctttttaaaggttgatcacactttaatcttcaatttcaggatagtaaagaaccattataatttag

SEQ ID NO: 21796 - DNA, 201 bp, Homo sapiens
tattttcttctgaatgaaattattgtcttttatcttggctttattcacctcccacacaataagtccatctaatcatatttaagagccagaacactgatttyaacccccaaatatcactctcattgatgagagctggctgcatggattcaaatcagaatgtagctcttcttttatatgctaaaagtaatttaaaattatatc

SEQ ID NO: 21797 - DNA, 201 bp, Homo sapiens
tttttaaaaaaaactaagtatgtgcctatgcttttcctttttaaccatattgaatgtgtaatgttgagttagaagacactgtgtgaggtaagaaatggcarttcaaggggaacaagaacattcgtttattcagtcaacaaatatggattgagttcctcccataggcccagcattgtactagggaaattgctcactattttt

SEQ ID NO: 21798 - DNA, 201 bp, Homo sapiens
accctattatccccattttcatatgattttccagaggtttataaactggttcagaatatcagaactaatgtatttgaacccaaatttacaccaaagccaamgattgtgcccgttcagttaggccaaactgcctttcagatttcctatgaagctgatccttccaactctaataaagcacagtctacccccagccgccactat

SEQ ID NO: 21799 - DNA, 201 bp, Homo sapiens
ttttaaccatattgaatgtgtaatgttgagttagaagacactgtgtgaggtaagaaatggcagttcaaggggaacaagaacattcgtttattcagtcaacmaatatggattgagttcctcccataggcccagcattgtactagggaaattgctcactatttttatttttcccctctaacctaaggtggagatgataatgaa

SEQ ID NO: 21800 - DNA, 201 bp, Homo sapiens
gttagaagcagactttttcagaaacctgtttgaaaggaatgatccaggttttatgaaatcaactcaagaacccactgttcttcatctgcatcagtaccatsattacagttgttgacagtgaaggccctagagcactgcagtattctcatttgtgcatgcaaaatttaatcacatttattatgttgtatttattaaagcaga

SEQ ID NO: 21801 - DNA, 201 bp, Homo sapiens
tcaagagtgcattttgatatgacttttctattgaccaccaagaaaaaattatctgaaaaatgaaagatcccatacttgagtcctgaaagatgctatctaaytatgaattaaagcaaccagagtaaaagatccaatacaattgtaaatatctttaaaaatgtgggttgaggaagaagaattttttcatggattggtatccgt

SEQ ID NO: 21802 - DNA, 201 bp, Homo sapiens
tctttaggctcaattctgcactcagtaaactcttggttttggccctggcagaaggcctagcaactcattggtgctcatgtctgtgcaccagctgcttgccracctcagcctctgcctcaaactctgagcctttgtcctctgtgcttaagactccctgcctgagcttcccaccttagctaaccttccagaacttgacgtttc

SEQ ID NO: 21803 - DNA, 201 bp, Homo sapiens
tctttctgactttacacaagactcacccatttacctgtattaaaaattactttccaggaagtgccacagcaatttttcaacacctaagcaattttttaaayaagtggatatagtgttatatgtgtaccaacccatcctgtattaattgactgaaattacatctattcagctatattttcttctgaatgaaattattgtctt

SEQ ID NO: 21804 - DNA, 201 bp, Homo sapiens
ggtgtttttgtttttgtttttgtttttgttttgagacggagctattctcttgcctcagtctcccgagtagccgggaccacaggcgcccaccaccacgcctygctaatttttatatttctagtagagacggggtttcaccatgttggccatggctcgtctcaatctcctgaccttgtgatccaccctcctcgccctctcaaa

SEQ ID NO: 21805 - DNA, 201 bp, Homo sapiens
tttcaaaatttgattgttacatatattgtcatttcagtgactggagacaagatgtatatgtagacaaatagataaaaacagggtaattaaaccagtgtggtttttttttattttaaaggaaaacacatacgacttatgtacattgcatggcagagtattactaaaattcgcctaaacaaaccgtcacgatgttttcaggtt

SEQ ID NO: 21806 - DNA, 201 bp, Homo sapiens
tcaaaaaacagaaagttaaatgccttcaggtacataaggctgttaacgaaatgtcacataatcaaagcatttaacaaatattagttaacatcattattaaktcttcccaacccacgaaatggatggttccctggaaagtataacaacattatgcaaagttcaaagggagcctccttttaccataggaacctttaggtgtag

SEQ ID NO: 21807 - DNA, 201 bp, Homo sapiens
cagctaatttgggtttcaccatgttagccaggctggtctcgaactcctgacctcaagtgatccacccacctcgggcttccaaagttctgggattacctgcrtgagccactgtgcccagccaaggatatttttcttgtagtatctccattatcaaaacgtgctggaaaggatgttttacttgtttatcaatatggtgatgcc

SEQ ID NO: 21808 - DNA, 201 bp, Homo sapiens
ggtcttgaactcctgacctcaagtgatccacccattttgacctcccaaagtgctgggattacaagtgtgagccactgcacctgtccgaattattctgtttstgtatttatggccacagaagtttcatattggctaaatctgcacaaattatcatatagttataaatataaaagtcagatcaatatggctaagattatcaca

SEQ ID NO: 21809 - DNA, 201 bp, Homo sapiens
cagttctctgtcttcacattttaccctcttaaacttaatttttgcaaaaaatttttctattcggttttcattttcctagggaaagggaaaaattgtccctratgaaaagtgtttatagtatttaaaagagttgctcaaagtgtaagactggggaaaaaaagcttatgttgttttttttgtctttatcaaaataatggtata

SEQ ID NO: 21810 - DNA, 201 bp, Homo sapiens
tggttttctgaaaataattttttcataagtgtgagctttttttccttcttatctccaaatgtttttcattggaatatttatgaaatcctattcaaagcttkatgtaaggggtttgcttagtcaccacttagtttgaagtctgtctttactaaaacaccaaacatctttgacaacatacaaagaggagttaacattgattct

SEQ ID NO: 21811 - DNA, 201 bp, Homo sapiens
agtacagatgggtagagggtgaaaagtagcaaccaatgttagcaatttcttgtgtatccttctagagttactctgcatatacaagtatatgtgtatgtatrtatatatatatatatatatatattctttttaaaacatacagatgaaaacatattatatatactatcttgtacctagtagattcaatttcagatctgtcat

SEQ ID NO: 21812 - DNA, 201 bp, Homo sapiens
ttttgtttttgttttgagacggagctattctcttgcctcagtctcccgagtagccgggaccacaggcgcccaccaccacgcctcgctaatttttatatttytagtagagacggggtttcaccatgttggccatggctcgtctcaatctcctgaccttgtgatccaccctcctcgccctctcaaagtgctgggattacagcc

SEQ ID NO: 21813 - DNA, 201 bp, Homo sapiens
ttttgagacggagctattctcttgcctcagtctcccgagtagccgggaccacaggcgcccaccaccacgcctcgctaatttttatatttctagtagagacrgggtttcaccatgttggccatggctcgtctcaatctcctgaccttgtgatccaccctcctcgccctctcaaagtgctgggattacagccgtgagctacca

SEQ ID NO: 21814 - DNA, 201 bp, Homo sapiens
tgacagttttaattttgtagatgaatttggcatgacgtggatgaattctgtcaaggtcattattgttttcttctcaaaaccaatagaattttctcacttayttatttttagaattgtcaggtagtgtaataaagttatttctgtaggaaactgggaattcattggctatttgactctgaatgtaacctctttaaagctgat

SEQ ID NO: 21815 - DNA, 201 bp, Homo sapiens
tgaagcaaaagtggaccagcacagctttttgtgggggttagtggtaggagagtgttatagtgaagttctttgttctgttttctcagtctcatttctcattsattcattaaatcaatagatatttattttgcctgtggtatgagctaaccatttctctgggtctggataatatagcagacaacaagatccagtctttggccc

SEQ ID NO: 21816 - DNA, 201 bp, Homo sapiens
gcaaggaacctatgaacagtcactaacacaaatatgatatctcagaattcacagaagtactaaccttccccaactaaaaagggtattgggggatttagtgkatccttccatcttaaaagcttcttaagatgtacatttgaaaactagataactgttgcttaataatactttactgagaaacactgtgtactaacaattcat

SEQ ID NO: 21817 - DNA, 201 bp, Homo sapiens
cagattgcatttttcttcttttgaaagtcctaattaaattgtttgccatgttatgcaaagattcattgagattctggggagtggcagtaaatttaagcaargattatactgtgattctggggagccatagtaaattgtgtatcaacaaatctaaagggtgaatttttactttctgcttattgtctttttcaagaaaattct

SEQ ID NO: 21818 - DNA, 201 bp, Homo sapiens
tcattgagattctggggagtggcagtaaatttaagcaaagattatactgtgattctggggagccatagtaaattgtgtatcaacaaatctaaagggtgaayttttactttctgcttattgtctttttcaagaaaattctatagttaccaaaaaggtggctgaattttgacataataaaggagaaggttgagctggcctttg

SEQ ID NO: 21819 - DNA, 201 bp, Homo sapiens
tagccactttcttacttttacaaaaagttagtatggtgttttttttgtttttttgttttttggtttttttttgagatggagtcttgctctgtcacccaggytggattgcagtggggcgatctcgggtcattgcaacctccacttcccaggttcaagcgattcttttgcctcagcctcccaagtacctgggattacaagtgg

SEQ ID NO: 21820 - DNA, 201 bp, Homo sapiens
aatactgtacagattcccatcttatcagaggaagaaccagttagcataacatagaattttagggctagaagagactttcaacatcatcaagtcttacctckcggtattcaatagttcaatataattattatctttttacaggtcttagctttcctgccctaatttccaaaacaatgaagaactagtagtccccagatcccc

SEQ ID NO: 21821 - DNA, 201 bp, Homo sapiens
atatttattttgcctgtggtatgagctaaccatttctctgggtctggataatatagcagacaacaagatccagtctttggccccaaagagcatacagtacrggtactcacaacatggacaatgctagataactgcccagagagcagagaagctacatgagatcattataaacctgtgcacctgaaccactgcacaagcaat

SEQ ID NO: 21822 - DNA, 201 bp, Homo sapiens
actacgcggcctcagccacccctaatcaggccgggggcgcagccgaaatccaggagctggcctccaaacgagtggacatccagaaaaagaggttttacctrgacgtgaagcaaagctcccggggccgcttcctaaagatagccgaagtctggatagggagaggccggcaggacaacatcagaaagagtaaactgaccctct

SEQ ID NO: 21823 - DNA, 201 bp, Homo sapiens
agtatgtgtaatatatattaaacatacatatattgcacatgcatatatatacaattttttacatatatatgtaaaaatttttaaaagagatcccaatcctrttcacctttttcttgtccctggagaagtagtggtaaatgggtttcatctcgcttgtatttgcaattgattggctgccctaaagtgctgtgtttgtatcta

SEQ ID NO: 21824 - DNA, 201 bp, Homo sapiens
actcttggataatgataactaagtcttcgtttcatgaatttaacaatttgtatcagtgctaccttatgagtttttcagaaaaatgctatttgtattgaacyattttaaataattccataatctggaataattcagatttttttaatgatctgctgcaacatattggtattattgaatctcattttttctttgatttccatt

SEQ ID NO: 21825 - DNA, 201 bp, Homo sapiens
tcttttccctgcattccattttttattatttttttattttttattttttcaagacagggtcttgctttgtcacccaggccggagtgcagtggtgcagtgayggctcactgcagccttgacttctggggcttaagtgatcctcccgcctcagactcctgagtagctggtactacaggcatgcaccaccatgcccagctattt

SEQ ID NO: 21826 - DNA, 201 bp, Homo sapiens
gtaattaaaccagtgtggtttttttttattttaaaggaaaacacatacgacttatgtacattgcatggcagagtattactaaaattcgcctaaacaaaccrtcacgatgttttcaggttttatggtaatgctttgactatatagtatttggatttgaatcctcataatcacaaagtctcttagttgtttaaaacaaaaaac

SEQ ID NO: 21827 - DNA, 201 bp, Homo sapiens
tgtaaagcatagataggtgcccagctccatccccaggaattctgattcggtgagacaggaaatagagggtgtattaggtccctagggctactgtgacaacrtgccacaaacttggggctttattctctcacagttgtggagaccagaagtctgacatcggggtgtcagcagaccatggttccctctgaaggctctagggga

SEQ ID NO: 21828 - DNA, 201 bp, Homo sapiens
agtaatgatagtccacttttaatgggtgcttaccatgtgctgagagcttgagatcccctccattagctaagtcctcaggcaactccttccagtaggtcctrtacttatccccattttacagatgggacatgcaaagtttagagagttacataccttacccaagcccacatagctagtaggcaacctggctccaaagctcac

SEQ ID NO: 21829 - DNA, 201 bp, Homo sapiens
agattcaaaaatggaacttcacagtttctaattttccatcctatttgtagggcagcgatgaaaagccttgaaagcgattcatttgtccatccattctcagrgtgggcctgggattccaaggggaggatttggatgctgactccctccgtggctttctttcagatcacatattctacaaattccagccttctgtggtcgctg

SEQ ID NO: 21830 - DNA, 201 bp, Homo sapiens
catgtcaccccagggcaaggacagagctttctctttctgctggaatccaactccctcacttactttcttttctttctttctttctctctctctttctttcyttttttttttttttttttttttttaagtaaagacggggtgtttctatgttgcccaggctggtctcatcaagcgatcctcctgtctcagcctcccaaagtg

SEQ ID NO: 21831 - DNA, 201 bp, Homo sapiens
cagacttctaacaggaggtcctgtttttcttcctgaattttctgagcagcaaagtagatagaacttgcactcgtctccttttgatttatgcccattttacrcatagtcttccctctccaattagaaggaaatagttatgttagtaagcaaagacacacaccactgtgacttaaggcttcatgagtgtgtagaagactttct

SEQ ID NO: 21832 - DNA, 201 bp, Homo sapiens
acacacaccactgtgacttaaggcttcatgagtgtgtagaagactttctgaatacagggatttctggagttcttaggggaaaaaaatctccctcccaaagscatgttgataagctctgcttgacatgagctggtaactttatcttcctgggctccagggagccaggggctaggggctccctccttctcgtccactgggtgt

SEQ ID NO: 21833 - DNA, 201 bp, Homo sapiens
cacatttcttaaaccagtggacagataaaagatgtttgatttgtgactgaatctatgcaaagatcttccaaaacatgaacagcaaacatttcgtttagtgwtgataatgttagtagctactgtttattgagcactttctagatttcaggcagtgtgccagcatgctcccatatattatcttatttactcctcactttggcc

SEQ ID NO: 21834 - DNA, 201 bp, Homo sapiens
attaaccccagtttacagacaagaaactgcaaggctcacaggaataagtgtctgagatgaaaccgcggattgtatcaaagcttgaacgtaaattcattttwaaaatatccaatttaacacaaagtggaaatacaaagcaggggaaaattgaggttctgtcatccatgacactataggctcttgtgttttagtttgttttct

SEQ ID NO: 21835 - DNA, 201 bp, Homo sapiens
catccatgacactataggctcttgtgttttagtttgttttctggcgctctccaacggatgtgctctctctaaaccatcctgagaagccagccgctatggaygtgggccttgctgtgggcattggaaagggctgatgactaggccaaggtcgcctttatttggccctggtgagtggccatgcctggacctcacctgtgtgtg

SEQ ID NO: 21836 - DNA, 201 bp, Homo sapiens
gccagccgctatggacgtgggccttgctgtgggcattggaaagggctgatgactaggccaaggtcgcctttatttggccctggtgagtggccatgcctggrcctcacctgtgtgtggtgcctctcccctcaaagtgatttggcctctgccattgcctgtccctaacttgccagggaaaaggacacctcagggcccccccgc

SEQ ID NO: 21837 - DNA, 201 bp, Homo sapiens
acgggggggaaccccctttttaaataggtccccaggggatttgaatgcgtgtggtcaactggcaacccatttgagaaacctttggactgtagatgggtagsgaagtagagtcgcagcgagggggtagtggtgcagtcaccctactgtcccattttgggcttctcattagggtcgaagctcccaggagaatccacaaaagga

SEQ ID NO: 21838 - DNA, 201 bp, Homo sapiens
gggaggatgaggggcaccccagtcctccactccagaaggtatgggggatgcggtcctgtaggaagctggcagaagtaaagaattcagttggagggtgtggygtcttttaaaaaggccatgaatgttgtgtatgggggtgtttggaggccccagagccatgggttggatgggggaccagtgagggttgtgcacgcatgtgtg

SEQ ID NO: 21839 - DNA, 201 bp, Homo sapiens
ttacaggaatgtgtcattcaggcctttcaagctcaaatgctggctttgacaagctctttcctcctctaatggcagggctatcttatgtttgcagtcttcargtgagacctgaagcagtctgccctcatgaccccctggagatgaaggtgtgggggttcataaaataaggagaaatttcctgcagtctaacctgcagaggtg

SEQ ID NO: 21840 - DNA, 201 bp, Homo sapiens
ctatttgtagggcagcgatgaaaagccttgaaagcgattcatttgtccatccattctcagggtgggcctgggattccaaggggaggatttggatgctgacyccctccgtggctttctttcagatcacatattctacaaattccagccttctgtggtcgctgcggcctgtgttggggcctccaggatttgcctgcagctttc

SEQ ID NO: 21841 - DNA, 201 bp, Homo sapiens
ttttctccactccaggaaggaagaatctgagagaaaaaagcattagcatcagaaaggtctctattgagcctggccctgcgtgggcttccacccctgggacrctggcctcccttgccagcaaaggctgcaaagctgggaaaaagccctttcagccagagctttctctttcctcttctgtccctgccacctgactgcgtagca

SEQ ID NO: 21842 - DNA, 201 bp, Homo sapiens
ctgcccacatgcacctgggaagatagatgtcaggccccacctgggaaaaggcaaggcctgggtaccactgggcggtccttgatccctctgacccgccagcmccatctttcctttatcatcagcacctgcagggtaggctggtggctgctggaggggcatggggatagctatgggatctcaacttctgataaaagtctggtt

SEQ ID NO: 21843 - DNA, 201 bp, Homo sapiens
tcgacttcgtgttctcaggtcgcctgcgtgggaactcagaactcccgggtgcctttttttcctcttaccctttaccttctcccggagtgtctgagcggaaytggggggcgggggttagagactggagatgggagagattgaagttggtttttctgataaggagctcagaactctgggccaactagtcagagacagccactg

SEQ ID NO: 21844 - DNA, 201 bp, Homo sapiens
tgcccccccacctgtcaatctcaggtttttaaatctgcttccagatagacaggaaggctgggcgcggtggctcacacctataatcccaacaccttgggagrcagaggcaggtggatcacctgaggtcaggagtttgagatcagcccagccaacatgatgaaaccttgtctctcctaaaaatacaaaaatattagccaggcc

SEQ ID NO: 21845 - DNA, 201 bp, Homo sapiens
taaaacactttatctatttcccatatacatttttccatatcattcttctccacccaattcctgattattggacactagcaaaaaattagaaacaatcaatygtttgtttagaacagataacacatgaatgtgattttgtaaaaccacgctatacaaaagagtagatgatggaaaggcttcctgccaccgttgtccccaaat

SEQ ID NO: 21846 - DNA, 201 bp, Homo sapiens
acacctgtaatcccagcactttgggaggccgaggcaagtggatcacaaaggcaggagttcaagaccatcctggccaacatggtgaaatcccatctctactraaaataaacaaaaaaattgctgggcgtggtggcacatgcctgtagtcacagctattcaggaagccgaggcagaagaatcgcttgaacccgcgaggcagag

SEQ ID NO: 21847 - DNA, 201 bp, Homo sapiens
cctactagagaagttgaaatgggaggatcacttgggcccaggagtatgaggctgcagtgtgctatgattatgccagagtgaaacccctatctctttttttwaaaaaaagagtgggaacctcgagtgggaaaatgactagagcgggggtgtccaatcttttggctttcttgggccacactggaagaagaattgccttgggcc

SEQ ID NO: 21848 - DNA, 201 bp, Homo sapiens
ataatgttttaagaaagtttaggagtttgtgcttgccacatttaaagttgtcctgggcagcatggggcccatggtctgtgggttggacacgcttgtgctakaggatggcaaggcgagaggaagggaactctgaatcctttctaggcttcatggagccccatctgcagcacggaactgggctgagacctgcatcaagggctg

SEQ ID NO: 21849 - DNA, 201 bp, Homo sapiens
actctttggagtgaaccattgttttttccttaactttttattgtggaaatttaaaaagataacacaaatgtggaaagaacagtagaatgagtcctcacatrcccaccacccagcttcctcacctgtttcatctgctcccccagacagtgtgtcattttacccataaatggcactaccagataagggcttttttttttttta

SEQ ID NO: 21850 - DNA, 201 bp, Homo sapiens
aaatgaatacaagcaaacagaagaaagtaaaattcccctcacaatcctaccacttggaaacaatctctgttgacatttttggtgtgtgtcctttactgtgygtgtcatcacaatacatttttattttggatttttttttttttttgtaaaaatggaaaataccggccgagtgcagtggcttacgcctgtaatcccagcact

SEQ ID NO: 21851 - DNA, 201 bp, Homo sapiens
gcagtgcttcacccgtattctcgaggaatctggtgacaaaactgaaccagaacttggcgttgtcacttgagtcttttaggtcttagaataccaaaatgctsagtgtgtgcacgatacccagtcaagacatggtctcagtgcaccttatctgtggcagaagcaaattacctttgaaggcttcctttcctctgcaaaatcacg

SEQ ID NO: 21852 - DNA, 201 bp, Homo sapiens
ctggccgaatgccacctctgacctagaaggcattttcacaatttcctcctaaagaaaacaaccacccacaacctcacctctggtctctttttaaaactggsctcaggaattgattcagcctgtcagaaatgggcttgctttcattctttcatccatccgtccttccatccattcgttgattatttatcaaggcctctgtgc

SEQ ID NO: 21853 - DNA, 201 bp, Homo sapiens
agtgttggggggagtatggggggagctgccaaagccaatagagccagtcggccagagcctcaaccctgggatttccagccatgcaggaggctcttcctctytgggcagctttgacctcgcgttggcctgcctgagttgttcttgtgtgcaagacaagaaagtgtgtacttcggacacagcaccattgcaggctgagtgact

SEQ ID NO: 21854 - DNA, 201 bp, Homo sapiens
gtctccccactggagatttcagaaacttgaaagcagtcttaatcctttctggtcgacaaggatgaatgaatatgctgcttcctagcctggagaagttaaayacatcagctctccccaaagctgggaatgcttgagatgcctccacggctctaattgtaggcagcagctgcaaatggggcaatatttccaggtggtcttttt

SEQ ID NO: 21855 - DNA, 201 bp, Homo sapiens
cttgagatctgcagggcaaccagccacctaatgcattttttcccacttcctgaagcttacttcattgcacactcagaggacttcagctctgtgagaccgcttttttttttttttttttttttgagacggagtcttgctctgtcacccaagctggagagcagtggcatgattttggcttactgcaaccactgcctcctgggt

SEQ ID NO: 21856 - DNA, 201 bp, Homo sapiens
ttgagatctgcagggcaaccagccacctaatgcattttttcccacttcctgaagcttacttcattgcacactcagaggacttcagctctgtgagaccgcttttttttttttttttttttttgagacggagtcttgctctgtcacccaagctggagagcagtggcatgattttggcttactgcaaccactgcctcctgggtt

SEQ ID NO: 21857 - DNA, 201 bp, Homo sapiens
aaatgggtgtgggtgtaccccatcaatctccagggcctccacatcatgagatgggcaagggacttggctgggcaccctggttggctggggaagcctgtgctgtctaagggagtggaggacatttaagacttggagctggccctgtgcccttgtcattgacttcttctttgtcttcctaaatcacacagtccctcgggtaaa

SEQ ID NO: 21858 - DNA, 201 bp, Homo sapiens
cttgcaatgcagcctccaagttggtgatggtataacatggacttcccctcaagcagagctgacaccctgggcagccaccaagctaggtgagaaggcggggrttggtggagcaaagctgttgacttggcgctggaatttctcttcggtctctccttttgtgttaacttttggttttgaaatcatttcaaacttagagaagag

SEQ ID NO: 21859 - DNA, 201 bp, Homo sapiens
ggaaatagagggtgtattaggtccctagggctactgtgacaacgtgccacaaacttggggctttattctctcacagttgtggagaccagaagtctgacatyggggtgtcagcagaccatggttccctctgaaggctctaggggaaggtccttccttgctcttctatcatttggcagcagctggcattttatccgtggtctt

SEQ ID NO: 21860 - DNA, 201 bp, Homo sapiens
aatgggtgtgggtgtaccccatcaatctccagggcctccacatcatgagatgggcaagggacttggctgggcaccctggttggctggggaagcctgtgctgtctaagggagtggaggacatttaagacttggagctggccctgtgcccttgtcattgacttcttctttgtcttcctaaatcacacagtccctcgggtaaag

SEQ ID NO: 21861 - DNA, 201 bp, Homo sapiens
atgggtgtgggtgtaccccatcaatctccagggcctccacatcatgagatgggcaagggacttggctgggcaccctggttggctggggaagcctgtgctgtctaagggagtggaggacatttaagacttggagctggccctgtgcccttgtcattgacttcttctttgtcttcctaaatcacacagtccctcgggtaaagg

SEQ ID NO: 21862 - DNA, 201 bp, Homo sapiens
accttgagctgtttacgaagtggttgtcgccctccaagtattgtcataccccaagccctggcccgctcctctgatgtccaagcccaagatttaccactcayctgcagtgtggccttggcagttatacttctgtgcctcagtttcctggctactagggctagtgctggttccacctcggagggtgggtgtggggagatagca

SEQ ID NO: 21863 - DNA, 201 bp, Homo sapiens
tgggtgtgggtgtaccccatcaatctccagggcctccacatcatgagatgggcaagggacttggctgggcaccctggttggctggggaagcctgtgctgtctaagggagtggaggacatttaagacttggagctggccctgtgcccttgtcattgacttcttctttgtcttcctaaatcacacagtccctcgggtaaaggg

SEQ ID NO: 21864 - DNA, 201 bp, Homo sapiens
tgaggcacatgtcaccccagggcaaggacagagctttctctttctgctggaatccaactccctcacttactttcttttctttctttctttctctctctctytctttctttttttttttttttttttttttttaagtaaagacggggtgtttctatgttgcccaggctggtctcatcaagcgatcctcctgtctcagcctcc

SEQ ID NO: 21865 - DNA, 201 bp, Homo sapiens
aattcccctcacaatcctaccacttggaaacaatctctgttgacatttttggtgtgtgtcctttactgtgtgtgtcatcacaatacatttttattttggatttttttttttttttgtaaaaatggaaaataccggccgagtgcagtggcttacgcctgtaatcccagcactttgggaggctgaggcaggtggctcacttga

SEQ ID NO: 21866 - DNA, 201 bp, Homo sapiens
ctttctttttttttttttttttttttttttaagtaaagacggggtgtttctatgttgcccaggctggtctcatcaagcgatcctcctgtctcagcctcccraagtgttgcaattactggtgtgagtcactgcacccagcccctgccctgtttcttatgcctcctcgctggtcttcatgagtactgggaattgcttattatg

SEQ ID NO: 21867 - DNA, 201 bp, Homo sapiens
attcccctcacaatcctaccacttggaaacaatctctgttgacatttttggtgtgtgtcctttactgtgtgtgtcatcacaatacatttttattttggatttttttttttttttgtaaaaatggaaaataccggccgagtgcagtggcttacgcctgtaatcccagcactttgggaggctgaggcaggtggctcacttgag

SEQ ID NO: 21868 - DNA, 201 bp, Homo sapiens
agtatttgccattcctgaaatatggaggtttttgtaattatcaggtgttccttttgcatcaggtattggggtcacagagctgaacaagacaagcccagtcygtgccctcatggtggttacagtctagcaggcaggaggacagtaagagcaaatgaatgagtagataaaaagtcctaggtgcttgggggggatctcacagaa

SEQ ID NO: 21869 - DNA, 201 bp, Homo sapiens
taagaaagcataaattacgtatgctttgacagagaggtagtatgaattacacactttaccatttcattattttaatgtttattttattttattattattattatttttttttattgagacagagtctcactgtgttgcccaggctgaagtgcagtggcatgatcttggctcactgcaacctctgcctcctggggacaaatg

SEQ ID NO: 21870 - DNA, 201 bp, Homo sapiens
acagtgggtatctagtctttttgtttgtttccaaactgaaaacatagtaactgaagtaataaagtggttatgcattgagcatttttgaaaaattcaggctrttgaaaagcatgatcgtgaaaatgcaagatctcagtgcccatcccgacctctcctccgtagccactgttaatattttgatgtatcttttctaagtttttt

SEQ ID NO: 21871 - DNA, 201 bp, Homo sapiens
agaaagcataaattacgtatgctttgacagagaggtagtatgaattacacactttaccatttcattattttaatgtttattttattttattattattattwtttttttttattgagacagagtctcactgtgttgcccaggctgaagtgcagtggcatgatcttggctcactgcaacctctgcctcctggggacaaatgat

SEQ ID NO: 21872 - DNA, 201 bp, Homo sapiens
tttgtttccaaactgaaaacatagtaactgaagtaataaagtggttatgcattgagcatttttgaaaaattcaggctgttgaaaagcatgatcgtgaaaahgcaagatctcagtgcccatcccgacctctcctccgtagccactgttaatattttgatgtatcttttctaagttttttctagcccgtagctattatgttaa

SEQ ID NO: 21873 - DNA, 201 bp, Homo sapiens
aatgatgtcgcagtttattttaaaacaaatttaagtaaaagtagtaactctatataaagataagtggtagtacagggaatacatggttatggccaaatacrtgtatctatgtgtatatctagaatgggaccgaatgaaatttaaggaacacctgtataattgaaagaggctacaaaacagggaggctgagggaagaaaaca

SEQ ID NO: 21874 - DNA, 201 bp, Homo sapiens
gatcattggagtagaacccaccctaatccaatgtgatgtcatcataatttaattacatctgaaaagactccatttccaagtaaggtcacattctgaagttycagattaacatgacatttggggggacactactgcgcccaatacagggaggaaaaggtcttcctagtgcagtacctgagcccccacacaggtttcacagtc

SEQ ID NO: 21875 - DNA, 201 bp, Homo sapiens
atatgtttctaacactgtagaacaactttacaagagcgtggcacacagtagacactcttagttgaatgttgcctgatgaatacaaagcatgtttacatatrtgctgtgtaactgtttccatacaaccacaagcagttatcctcacctgaccgacacaggaggcgaagttgagatcactgagacgttgggagccccactttg

SEQ ID NO: 21876 - DNA, 201 bp, Homo sapiens
ccagcttgagggaagaggaagggccactaggcttgctgagctgctgttaacaccaaatactctacatttacggcagcgtgacccccatttctcagataggracactgagggtcagttcacatgcccaaggttggtaaatagtggaactaagattccgacccagaactgcctgacctcacactctgtaggtatcaagctaat

SEQ ID NO: 21877 - DNA, 201 bp, Homo sapiens
ttgtaaagcatagataggtgcccagctccatccccaggaattctgattcggtgagacaggaaatagagggtgtattaggtccctagggctactgtgacaaygtgccacaaacttggggctttattctctcacagttgtggagaccagaagtctgacatcggggtgtcagcagaccatggttccctctgaaggctctagggg

SEQ ID NO: 21878 - DNA, 201 bp, Homo sapiens
ctgagcttgttcagcctttttcatagtaaacattattcttggagggccccttctggaaactgtcagttgaaggactccctctgccctgtaagtgaagggarttgatgttcattgggcacctgcagagtgctagcaactgttaagtgccttgtgtatgttatctggcttgattattaaagttgcttcagaaagaaaaaggat

SEQ ID NO: 21879 - DNA, 201 bp, Homo sapiens
ttggagagaacttcaatggcatcagaaggaaattggccacactgcggtccgtccatgcatgaaaatatggtgcagtcattagacgcaacgtggtagacagygttggtgtgcaatggacttttctgattattgtaaaaaaaaaaaaaaaatccaagcaattcagagcacttccgactctttggagtgaaccattgttttttc

SEQ ID NO: 21880 - DNA, 201 bp, Homo sapiens
tggctcacacgtcacagtggggtttcccacttggggagcagtgacctctgccatgggttaccctaaggaaggaagccagggtagataagggagtcccgagrggaagggagggcatagagggccacaggcagagggaagattcctcaaaacactctccatgtattcagacgtccattcactgagccagcagctactcattag

SEQ ID NO: 21881 - DNA, 201 bp, Homo sapiens
caggggaaaattgaggttctgtcatccatgacactataggctcttgtgttttagtttgttttctggcgctctccaacggatgtgctctctctaaaccatcytgagaagccagccgctatggacgtgggccttgctgtgggcattggaaagggctgatgactaggccaaggtcgcctttatttggccctggtgagtggccat

SEQ ID NO: 21882 - DNA, 201 bp, Homo sapiens
gccatctgtccatgcctccacctgttcatctctagatactcctgcggcagatgggcttccctgagtcaggtgatcaagggccaacagctggggagggagartgatcaggaagcctctgcccttccctcccctcccacctcagcccccttcttctacagcctccccctagcctttctgctgcccacactctcaccgcctgtg

SEQ ID NO: 21883 - DNA, 201 bp, Homo sapiens
ccagcgctttaggaggccaaggtgggaaggatcgcttgaggtcaggagtttgagaccatcccaggcaacacaatgagacccctgtctctacaaaaaatacraaaacaattagctgggtgcagtgatgaatgcctgtagtcctagctacttgggaggccaaggtgggaggattgcttgagcccagaagttcaaggcttctgt

SEQ ID NO: 21884 - DNA, 201 bp, Homo sapiens
atttcccctccctgcccctccatccttcatcctgcttggtgctgcaggactatggcacccactttctcctgtagctttgtctgcttttggcaggcttccayaaaccccatgggcacgatcacccagttccggaagcacagatttagagttttcagaattctgtctcgttttccacgctggcaccttttacctgctgttgtt

SEQ ID NO: 21885 - DNA, 201 bp, Homo sapiens
gttgcctgatgaatacaaagcatgtttacatatatgctgtgtaactgtttccatacaaccacaagcagttatcctcacctgaccgacacaggaggcgaagwtgagatcactgagacgttgggagccccactttgtcaaatatgagattccagtctggcatcatactacagggtatcaaaaacttgacaccatggaaacaag

SEQ ID NO: 21886 - DNA, 201 bp, Homo sapiens
ggctgtggagggcacactgggcatcgtatttcaagcagcacaggagaaatttgcgccacggcctttggcctgctgctgtctgtgatctatgggctgcatcrcggcccgctgggggcaggggacttatatttccatggggccatggaagctctccccgagtgtctgtctggggagctgggatgtgaggcacacactggagac

SEQ ID NO: 21887 - DNA, 201 bp, Homo sapiens
atatatgctgtgtaactgtttccatacaaccacaagcagttatcctcacctgaccgacacaggaggcgaagttgagatcactgagacgttgggagccccastttgtcaaatatgagattccagtctggcatcatactacagggtatcaaaaacttgacaccatggaaacaagtcttggtactgcatgcacgctagtgatgg

SEQ ID NO: 21888 - DNA, 201 bp, Homo sapiens
tgagccttgaaatcaccagcaggaggccagagttcaaggtcacagtcctggggaaaggaagctgtaacgactccagtccactccatgcattccagcacagygttgactgtggagtcgggtaagggtaggggagccttttgttgggcctttttcagcccctttttcagaacctgtaagaaaatatttctagataacaggact

SEQ ID NO: 21889 - DNA, 201 bp, Homo sapiens
acctccaatgtcatctcactgcacttaaaattcccagtccttaccactgcgtggaatacccagcatagcctggctctggcctgctctctgaccttgtctcytaccccttccctaccctccatgccattgctcttaagccacactgacctcctttctgttcctggaacaagtcaagcttgttcatgtctcagggtctttgca

SEQ ID NO: 21890 - DNA, 201 bp, Homo sapiens
ctcagtgcaacctccgcctcccgggttcacaccattctcctgcctcagcctcctgagtagctgggattacaggcatgtgccaccacacccagctaattttygtatttttagtagagacggggtttcacctgttggtcaggctggtctcgaagaacccctgacctcgttatccgtcagcctcggcctcccaaagtcctggga

SEQ ID NO: 21891 - DNA, 201 bp, Homo sapiens
atacttgatgttaagcaagtaatctaagtgtaggaagtccgtttaatatctggaggtctctaaactgagctctggaggacaccgataaggggggtgagggraagagcattcccagcccggggaggggttggagtcccacgtggctggatcctgtgcttgaagagggagtgttggggggagtatggggggagctgccaaagc

SEQ ID NO: 21892 - DNA, 201 bp, Homo sapiens
ggggtttcacctgttggtcaggctggtctcgaagaacccctgacctcgttatccgtcagcctcggcctcccaaagtcctgggattacaggcgtgagccacygtgcctggcctgaagttatttttcatttgtttgctgcctttcttcccacactagaatacatgctacacgagaagaggcctgtgtctgtcttcttccttgc

SEQ ID NO: 21893 - DNA, 201 bp, Homo sapiens
gcactgatgtgtgctttgaggtcagctgggccgccccaatgcctcttttggcatttacttagtggcagctccacaccccatgaggctggccttggggtcaygggtgaacagaccgaggccaggcccttgaaggcctcaccacctgatgtgggagtcgtacagtacagggggctggtgtggagggcgtcttctgagaggcag

SEQ ID NO: 21894 - DNA, 201 bp, Homo sapiens
aatcccagaccaagagccaaggttaagattcaaaaatggaacttcacagtttctaattttccatcctatttgtagggcagcgatgaaaagccttgaaagcrattcatttgtccatccattctcagggtgggcctgggattccaaggggaggatttggatgctgactccctccgtggctttctttcagatcacatattctac

SEQ ID NO: 21895 - DNA, 201 bp, Homo sapiens
gtctcgaagaacccctgacctcgttatccgtcagcctcggcctcccaaagtcctgggattacaggcgtgagccaccgtgcctggcctgaagttatttttcrtttgtttgctgcctttcttcccacactagaatacatgctacacgagaagaggcctgtgtctgtcttcttccttgcgggggcctcagtgccatgaacacag

SEQ ID NO: 21896 - DNA, 201 bp, Homo sapiens
ctgtcttctttgccagcaatgtccaggcactgtaaggtgggccgttagcttcctgggttcaggtaaatgtcttccagtaacccctgcttcccctgctcccygacaggtaagttcgaggatcgggaagaccacgtccccaagttggagcaaataaacagcacgaggatcctgagcagccagaacttcaccctcaccaagaag

SEQ ID NO: 21897 - DNA, 201 bp, Homo sapiens
ctgggattacaggcgtgagccaccgtgcctggcctgaagttatttttcatttgtttgctgcctttcttcccacactagaatacatgctacacgagaagagrcctgtgtctgtcttcttccttgcgggggcctcagtgccatgaacacagcttcccgatgtgtatggaatgacaaggagaatgaataagtcagtcttcgctt

SEQ ID NO: 21898 - DNA, 201 bp, Homo sapiens
tgctgcctttcttcccacactagaatacatgctacacgagaagaggcctgtgtctgtcttcttccttgcgggggcctcagtgccatgaacacagcttcccratgtgtatggaatgacaaggagaatgaataagtcagtcttcgctttcctcttctgtaagctgggagaaacgttttacagcaatgttaagattaagtgaga

SEQ ID NO: 21899 - DNA, 201 bp, Homo sapiens
cccaaatggactcttctgggaaatgttgaatgaatgcttgtgtgcagggatgcttcctgggaatccttcatctcgtcttcggcatctgccaggacagtctktgtgtgtgtgggcacagcattgactgtggtgcccagcacaggatctggttgatggaggatgccaccccagcttcctacagacctgcatgttctcctgtca

SEQ ID NO: 21900 - DNA, 201 bp, Homo sapiens
tggccacactgcggtccgtccatgcatgaaaatatggtgcagtcattagacgcaacgtggtagacagcgttggtgtgcaatggacttttctgattattgtaaaaaaaaaaaaaaaatccaagcaattcagagcacttccgactctttggagtgaaccattgttttttccttaactttttattgtggaaatttaaaaagata

SEQ ID NO: 21901 - DNA, 201 bp, Homo sapiens
tgagtcctcacatgcccaccacccagcttcctcacctgtttcatctgctcccccagacagtgtgtcattttacccataaatggcactaccagataagggctttttttttttttaacataacaactatgccattttcacacctaaaataattaccaataattcattaatatcttctgttgtccattcctctgttgtctcaga

SEQ ID NO: 21902 - DNA, 201 bp, Homo sapiens
ggggagggaggtcaagacgttgcctatctgacttgtgtttgggggctttggactgcactgatgaaggcagcgtggcccggccaaaggtcacttggctaagkctaatttccggcagctgcagcccaccagacaccaaggatctatgactgtggctgctgcttgtcatgaccctaaacttagagccctgtgcttagaggaaat

SEQ ID NO: 21903 - DNA, 201 bp, Homo sapiens
aatatcttctgttgtccattcctctgttgtctcagaaatggtttttatagttgttcacatcataatccagataaagtccatgcattacatttttttttagygtcttttaagctgggcatggtggctcacttctataatcccagcactttgggaggccgaggtgggtggatcacctgaggtcaggaattcgagaccagcctg

SEQ ID NO: 21904 - DNA, 201 bp, Homo sapiens
gtgattctcgtgcctcagcctcccgtgtaactgggaccacaggtgtgcaccaccatgcctagctaatttttgtatttttagtagagacggggttttgccaygacgaccaggctggtcttgaactcctggcctcaagcgatccgcccaccttggcctcccacagtgcttggattacatgagccactgcacctggtccataac

SEQ ID NO: 21905 - DNA, 201 bp, Homo sapiens
ccaggctgcagtgagccgtgtttatgccactacactgtagcctgggtgacagatcaagactctgtctcaaaaaataaataaataaataaatataaaatacrtaagtgttctcaagtattttactctccaatggtcccctaccctgcctgaaaatattttttttcatgccattgattttcagagaaaacagtttgatttgtc

SEQ ID NO: 21906 - DNA, 201 bp, Homo sapiens
tttttctctatttatatttcttttcttcaaccaagttgcaaaaataatgccctattatcccttaatacttcagggtttatttctccggtgttttgtttttkttttttttttttgtaaatagagacgagatctcactgtgttgccaggttggtctcaaactcttaggcttaagcgatcctcccaccttggcttcttaaagtg

SEQ ID NO: 21907 - DNA, 201 bp, Homo sapiens
atcttcacagcccccagcccttcaaataaagcccaaattccccagcagggcatacaaattcctcccagtctgaccccaatcaacctcgctgcctcaccccyaaaccacaaagctcacgcagcctctgcagctcactcaaggccctctcgggccaccatgtttttgcatatgctgtccctggtcccggaagcatcctctgcc

SEQ ID NO: 21908 - DNA, 201 bp, Homo sapiens
agccaacccgaagcaccgtctgggtgtgtgttccattgtgggtctctccggcattaggggttagggcttgcataggaaaagtggctcagtgttcatgtgtkgggttctgccagccactgggccactgccaggaagcccgactctgcatccaggtgatgccaacacatcctgctcagcccagtaagaatccagttcctcagg

SEQ ID NO: 21909 - DNA, 201 bp, Homo sapiens
attgtaagtctcttgctttctttttggatcgtcctcattttggcttttctgggctcatggaggaggcagggccaggcattgggcctctcccattgggagtrgggagggcacaggccaggcccttgaccatctgcccggcctggtgaggttgggggttggatgtggttggctggccgtgatgaaacaacctgagttgccacc

SEQ ID NO: 21910 - DNA, 201 bp, Homo sapiens
aacacaggctaaggaaccaaactgaatccagttcaaattccaagctctgccattcatcctctgtgggatcttagacaagcaacttcacctctctcagcctwggtttcttcatctgtagaatggtcattgcctgccccccatgggtggttgtgtggttcagtgaggagacagatatcagaggtcacacagtggcccccctgg

SEQ ID NO: 21911 - DNA, 201 bp, Homo sapiens
ttccctccagcaggggatgccctttgacctctgcttcctgctacagagctcagatttcaaggtgagcaggaaacccctccccacctctcacccccgggtcycccagctctatcaggcgaatgggctttaagtaatcaccttgattgacattcagccagagtgatgctactatacagataacacaatcatttccttgtaagg

SEQ ID NO: 21912 - DNA, 201 bp, Homo sapiens
accatctccgtcaatggctctgtgcagctgtcctacatcagcttccaggtcagactgtgcacctggcaccggtcccaggggctgggatgcagggcccagcrtagctgtgtctaggcccagctgggtgggcccaagccaatctcctacccaggtcactctggggacaacctctgcttccctgtcccagtacctgcccgcccc

SEQ ID NO: 21913 - DNA, 201 bp, Homo sapiens
ctcccagtctgtctgtttcccacccaggcccagggggcgcagacaaaaagtgagttcaacacagaggccctgggtggccgagcagacagtaggaaggaccragggtctgagaggctggccccagccagcaggccactcagggcctacaggccccatcttgcccactcaagagttccctgtctgtctgccgggcacccagag

SEQ ID NO: 21914 - DNA, 201 bp, Homo sapiens
tcagggcctacaggccccatcttgcccactcaagagttccctgtctgtctgccgggcacccagagctggggacctgggggtctccctgaattcttcattcycccttctttacgtctctccaaggcaccaagaggcccgaagccaccgacatggcccaggcctccgggattcctcaccatgacgacaggggtccagttcccc

SEQ ID NO: 21915 - DNA, 201 bp, Homo sapiens
ctctatcaggcgaatgggctttaagtaatcaccttgattgacattcagccagagtgatgctactatacagataacacaatcatttccttgtaaggtgttaytcatggctgcctagtcatcttatacacctttatctgaatctacaggtgcacctgctgcttcttttactctgaaaataagaactagaggagtcatcacgtt

SEQ ID NO: 21916 - DNA, 201 bp, Homo sapiens
gtaatcaccttgattgacattcagccagagtgatgctactatacagataacacaatcatttccttgtaaggtgttactcatggctgcctagtcatcttatrcacctttatctgaatctacaggtgcacctgctgcttcttttactctgaaaataagaactagaggagtcatcacgttgctgtttggtggtgtgtgtctttg

SEQ ID NO: 21917 - DNA, 201 bp, Homo sapiens
tggtctctccctcttgcccttgcctctgcctttcggcttctccttggctctattaatgcttctcctcactgcccggtgccttttgttttaacagaaccccygcacagtccctgttcagcctgccttctccacggtgccattctcccagtctgtctgtttcccacccaggcccagggggcgcagacaaaaagtgagttcaac

SEQ ID NO: 21918 - DNA, 201 bp, Homo sapiens
gtcgctcctctgggagtcctccccgcctggaatattgttggacgctcccccatgaccccacggagtctgtacgtatctgtgccatgccagttcaaagcacyccattgtaactgtgtttgcgttgtctgtccccgtcactccacccccatctccctatgcccatgaggcttcagagggccgggactgtgccttgttcatttg

SEQ ID NO: 21919 - DNA, 201 bp, Homo sapiens
ctcgcgcacacatgcgctctcccattgaatttcctggtttcttttcagcagactcccgccaacccacctatgatgtacccccaccccacctatgtaagtgrtttctcagggagggcggaggttctgtttgtggtgggcaggctgggggtgaagggccacttcgggggtatccactagccttgcaaaatgaaaagcgaaggg

SEQ ID NO: 21920 - DNA, 201 bp, Homo sapiens
cagcacacgcctaattgcccttccatgctctgcctaaatgtcgctcctctgggagtcctccccgcctggaatattgttggacgctcccccatgaccccacrgagtctgtacgtatctgtgccatgccagttcaaagcaccccattgtaactgtgtttgcgttgtctgtccccgtcactccacccccatctccctatgccca

SEQ ID NO: 21921 - DNA, 201 bp, Homo sapiens
aggatgtcactaccgatcataggcttaagctcttctcctgctggtgcaaatcaggccggaagtttagcgttagtggggctgcctgcagaggggttgagggrcaggtgaccgtggtggagtccgggaacacggcaggaagttccaggaaggctaacatgaaaagggaggtggatgggggagtccaagggccaaaggctcatg

SEQ ID NO: 21922 - DNA, 201 bp, Homo sapiens
tctgtgcagctgtcctacatcagcttccaggtcagactgtgcacctggcaccggtcccaggggctgggatgcagggcccagcatagctgtgtctaggcccwgctgggtgggcccaagccaatctcctacccaggtcactctggggacaacctctgcttccctgtcccagtacctgcccgccccttctcctctgtcactctg

SEQ ID NO: 21923 - DNA, 201 bp, Homo sapiens
tgtttgctaatatcagcacttttccttaagcattttctacttatttttagaaaatcatactgtaaaggcaaaatccaataattgcacaaaaacacattagrtccaaattagagaaacaaaaagatgccaaccaagcagtctctgcgacgcaagttgtatgcaagatcccagacaaatgcaaggcagaggcaccgaagccct

SEQ ID NO: 21924 - DNA, 201 bp, Homo sapiens
aattgcacaaaaacacattaggtccaaattagagaaacaaaaagatgccaaccaagcagtctctgcgacgcaagttgtatgcaagatcccagacaaatgcraggcagaggcaccgaagccctcctgtgcctgtcactggcaataacccatgccacagaagactatttgctttccctgggcctaggtttgctgtgcgctttc

SEQ ID NO: 21925 - DNA, 201 bp, Homo sapiens
gagatctcgctgttgctcaggctggtcttcaacttctgggctcaagtgacccacctgccttggcgtcccaaggtgctgtgattacaggcgtgagccactgygcccggccccaatttcacatgctctttacatttgttctcttctttcccacttaatcaggcttgtgctagcctccaacaagtgtccactggcatggaaggc

SEQ ID NO: 21926 - DNA, 201 bp, Homo sapiens
gagcagttgggactacaggagtgcactgtgatgcccagctaattaatttttttttaaagtagagatgagatctcgctgttgctcaggctggtcttcaactyctgggctcaagtgacccacctgccttggcgtcccaaggtgctgtgattacaggcgtgagccactgcgcccggccccaatttcacatgctctttacatttg

SEQ ID NO: 21927 - DNA, 201 bp, Homo sapiens
tacgatcatagctcactgcagcctccaattcctgggctcgagcaatcctcccatctcagcctctggagcagttgggactacaggagtgcactgtgatgccmagctaattaatttttttttaaagtagagatgagatctcgctgttgctcaggctggtcttcaacttctgggctcaagtgacccacctgccttggcgtccca

SEQ ID NO: 21928 - DNA, 201 bp, Homo sapiens
ccttttgttttaacagaacccccgcacagtccctgttcagcctgccttctccacggtgccattctcccagtctgtctgtttcccacccaggcccagggggygcagacaaaaagtgagttcaacacagaggccctgggtggccgagcagacagtaggaaggaccgagggtctgagaggctggccccagccagcaggccactc

SEQ ID NO: 21929 - DNA, 201 bp, Homo sapiens
agggtccctcacaaatcccacgagggtgttggagaaagcaggctggggctctagccttttgggcaggagtctcggacacaggaaggtggtaatggggtacmccaggaaacagccccatgcctccgagatgggagaggggctggggcagagcctgtgagggccacagcagggtcagagctgcctcctcagacctggcgtccc

SEQ ID NO: 21930 - DNA, 201 bp, Homo sapiens
caggtgagctaagactagaaagacaaacctactgcaggaaacaaccagaagaatgaaaagtccaactggagccccgtagagactcgggttgatgcacttcrggtcacacacacgttcctgtaactggccccacactgaagaccagactcaggtcttcattttctagaaagagggtccaggagctcaggggtggtccccatc

SEQ ID NO: 21931 - DNA, 201 bp, Homo sapiens
ttaattaattattttttttcttttgagacagggacttttttctttgacccaggctggagtgcagtggtacgatcatagctcactgcagcctccaattcctrggctcgagcaatcctcccatctcagcctctggagcagttgggactacaggagtgcactgtgatgcccagctaattaatttttttttaaagtagagatgag

SEQ ID NO: 21932 - DNA, 201 bp, Homo sapiens
ttgttcaaggaaaaataaataataaataaatgaaaccccaggtgagctaagactagaaagacaaacctactgcaggaaacaaccagaagaatgaaaagtcyaactggagccccgtagagactcgggttgatgcacttcgggtcacacacacgttcctgtaactggccccacactgaagaccagactcaggtcttcattttc

SEQ ID NO: 21933 - DNA, 201 bp, Homo sapiens
tgtctctcccttccttggggcaggaatttccaaaggactacagggatgaagctgaagggctccaaaagaaaaaaatacattcagaggtatttcaaatgtamtcatctccatttattcatttattcatttaattaattattttttttcttttgagacagggacttttttctttgacccaggctggagtgcagtggtacgatc

SEQ ID NO: 21934 - DNA, 201 bp, Homo sapiens
tgcaagcagagtaggtctctgggcttgagaagcctgtgggtaagtcagtccgagtatgcttatctgagataaggatgtccccatccactcagtatgcaacstgaggtcacctctcctctgctccccatgagcattttatgcatatataaataatacccctgcagccataaaaaggaacgagatcatgtcctttgcaggaac

SEQ ID NO: 21935 - DNA, 201 bp, Homo sapiens
ttcgtgcagtacttccaccgcgtgcccttccaccgtgtggacaccatctccgtcaatggctctgtgcagctgtcctacatcagcttccaggtcagactgtscacctggcaccggtcccaggggctgggatgcagggcccagcatagctgtgtctaggcccagctgggtgggcccaagccaatctcctacccaggtcactct

SEQ ID NO: 21936 - DNA, 201 bp, Homo sapiens
tcccattgggagtggggagggcacaggccaggcccttgaccatctgcccggcctggtgaggttgggggttggatgtggttggctggccgtgatgaaacaayctgagttgccaccccgtgggcagccacggaagaccatgccccacattcacttctgtcacctgcaaagggaggctaggctgagagacgtttccccgagagg

SEQ ID NO: 21937 - DNA, 201 bp, Homo sapiens
ctggggatgttaacatgggattcaggctcaactcacaagaaacttttccatctcatgatggatgctgttgggcatgtccaatgtatgacttcatgagttayacagatgctaattcgtaggggcacttggaatcacatggttgttttgtgtcccatggtcaagcattctatcttatcagggcctacagtaacatgccaaaag

SEQ ID NO: 21938 - DNA, 201 bp, Homo sapiens
caccatgtcctgaaagatggcaccctcccacccgcagagtgcttcctgcaagctggcgttgagctgtgcctatagaagctcttttcaacattctttatggycagcagcccttggttggtgcagatggtgataggaccagtgggtcccacagcatggccacactgcacctccttcgctgtcaagtgggtcccccacgaagat

SEQ ID NO: 21939 - DNA, 201 bp, Homo sapiens
ggttgcgggtcatggagtcccgaaccctcctcctgctgttctcgggagccgtggccctgatccagacctgggcaggtgagtgcggggtcgggagggaaaargcctctgcgggaaggagcgaggggcccgcccggaggagtaaatctgcacatatatttaattacagattacaattacaatcaaggcagaaatgatctcatt

SEQ ID NO: 21940 - DNA, 201 bp, Homo sapiens
caatgggacaaggggaaccaggaggcccccaaggggatccctgggttccacacgaactcctcctaccctcattgtgtgacagcagccatgcctcctcctgkggatcaggatctattacctgtgcctggagaggaggggactcctcttctcacccgctggtctctggacacatactgtccaattcccctgtggcagctgtaa

SEQ ID NO: 21941 - DNA, 201 bp, Homo sapiens
cccctgtggcagctgtaatgtgtagttcaatgggcactcatttgtccccttttaagggtaccctcctttagaatccaggaccttctaccctgcagagtgtkgttttgggagagaagtgcaaaatcccacgacaggtgagttgaaggaatgggatatggagccacatccacttccaccccttggtatctggacccacgtgtt

SEQ ID NO: 21942 - DNA, 201 bp, Homo sapiens
ccactgtgactctcctactggtgcttggttcagctccaccccaaatcttaccccaccactggcactttcagcaccagggggtctgaaggatggtgactgcrccatggcctggatctgctgcagtgtcctttcctgtggaggctccactcaaagctggcatcctcctatgtcacctagagtgtgggtcaaagcaatacacct

SEQ ID NO: 21943 - DNA, 201 bp, Homo sapiens
gaggaggggactcctcttctcacccgctggtctctggacacatactgtccaattcccctgtggcagctgtaatgtgtagttcaatgggcactcatttgtcyccttttaagggtaccctcctttagaatccaggaccttctaccctgcagagtgtggttttgggagagaagtgcaaaatcccacgacaggtgagttgaagga

SEQ ID NO: 21944 - DNA, 201 bp, Homo sapiens
atcagtgtcgccgcggttcctggttctaaagtcctcgccggcccaccgggactcagattctccccagacgccaaggttgcgggtcatggagtcccgaaccstcctcctgctgttctcgggagccgtggccctgatccagacctgggcaggtgagtgcggggtcgggagggaaaaggcctctgcgggaaggagcgaggggcc

SEQ ID NO: 21945 - DNA, 201 bp, Homo sapiens
gattctccccagacgccaaggttgcgggtcatggagtcccgaaccctcctcctgctgttctcgggagccgtggccctgatccagacctgggcaggtgagtrcggggtcgggagggaaaaggcctctgcgggaaggagcgaggggcccgcccggaggagtaaatctgcacatatatttaattacagattacaattacaatca

SEQ ID NO: 21946 - DNA, 201 bp, Homo sapiens
tgtccaatgtatgacttcatgagttacacagatgctaattcgtaggggcacttggaatcacatggttgttttgtgtcccatggtcaagcattctatcttaycagggcctacagtaacatgccaaaagttgcttccaacatatttctctgctttggatggggcatatttctgtgctgtggatgacatggccttactccagaa

SEQ ID NO: 21947 - DNA, 201 bp, Homo sapiens
ggggatccctgggttccacacgaactcctcctaccctcattgtgtgacagcagccatgcctcctcctggggatcaggatctattacctgtgcctggagagraggggactcctcttctcacccgctggtctctggacacatactgtccaattcccctgtggcagctgtaatgtgtagttcaatgggcactcatttgtcccct

SEQ ID NO: 21948 - DNA, 201 bp, Homo sapiens
gatcaaggccgtggaagagtcctccagccactattggccatcaaaggagtcctctgtgtcccaggaatggtcctgctttggtgtccctggtgtgacccatyacccgctgggaacagcctgagagaagtagggcctctgcaccaatgctgctgaggatgtcagagcacaggaacgaggccttgggaaattacctggaaatgc

SEQ ID NO: 21949 - DNA, 201 bp, Homo sapiens
atgtcctgaaagatggcaccctcccacccgcagagtgcttcctgcaagctggcgttgagctgtgcctatagaagctcttttcaacattctttatggccagsagcccttggttggtgcagatggtgataggaccagtgggtcccacagcatggccacactgcacctccttcgctgtcaagtgggtcccccacgaagatactg

SEQ ID NO: 21950 - DNA, 201 bp, Homo sapiens
ataggtagcctcatccctgccactgtgtttgctccatttatgtacccatcctacccggcctgggctgacccatggggaaggctggctaatttcagtgcttstgcttggttgttcagggccatttcaggtttgggtgttttctggggatgttaacatgggattcaggctcaactcacaagaaacttttccatctcatgatgg

SEQ ID NO: 21951 - DNA, 201 bp, Homo sapiens
aggtgagttgaaggaatgggatatggagccacatccacttccaccccttggtatctggacccacgtgttcttcctactgagattacagaactgtagagatrtctttgatttttaaaatgcaccatgtcctgaaagatggcaccctcccacccgcagagtgcttcctgcaagctggcgttgagctgtgcctatagaagctct

SEQ ID NO: 21952 - DNA, 201 bp, Homo sapiens
gcctggagaggaggggactcctcttctcacccgctggtctctggacacatactgtccaattcccctgtggcagctgtaatgtgtagttcaatgggcactcrtttgtccccttttaagggtaccctcctttagaatccaggaccttctaccctgcagagtgtggttttgggagagaagtgcaaaatcccacgacaggtgagt

SEQ ID NO: 21953 - DNA, 201 bp, Homo sapiens
gcctcctcctggggatcaggatctattacctgtgcctggagaggaggggactcctcttctcacccgctggtctctggacacatactgtccaattcccctgkggcagctgtaatgtgtagttcaatgggcactcatttgtccccttttaagggtaccctcctttagaatccaggaccttctaccctgcagagtgtggttttg

SEQ ID NO: 21954 - DNA, 201 bp, Homo sapiens
tgggattcaggctcaactcacaagaaacttttccatctcatgatggatgctgttgggcatgtccaatgtatgacttcatgagttacacagatgctaattcktaggggcacttggaatcacatggttgttttgtgtcccatggtcaagcattctatcttatcagggcctacagtaacatgccaaaagttgcttccaacatat

SEQ ID NO: 21955 - DNA, 201 bp, Homo sapiens
gcgatttcattgattgcttgaccagatgggtaaggcatgggtcccagctctctaaactctatccatgccgcccaccaacaggtgcctggcacgcggcagcmcatctcctctgcccacagtaacagcaggacccggagagccatttccaggagtagacgtcggtaatgacgacgcattttttttttggcgtcaccgaaacca

SEQ ID NO: 21956 - DNA, 201 bp, Homo sapiens
gaaggtatttgggtggaagaaagccagtaagcccatggggctggctgggggcaggaccacgcgttatgaccaccgtcctgttcctacccccaggagccccrtttgaccccgtgcggctactggataatgctgtatccaatgttatctgttcttgtcttcgggaaccgctatcgctatggggacccggagttcctgaggctc

SEQ ID NO: 21957 - DNA, 201 bp, Homo sapiens
ggtgtgggagagtcccttgcactgccaagacggggccactggaaggtatttgggtggaagaaagccagtaagcccatggggctggctgggggcaggaccamgcgttatgaccaccgtcctgttcctacccccaggagccccgtttgaccccgtgcggctactggataatgctgtatccaatgttatctgttcttgtcttcg

SEQ ID NO: 21958 - DNA, 201 bp, Homo sapiens
aacagcaggacccggagagccatttccaggagtagacgtcggtaatgacgacgcattttttttttggcgtcaccgaaaccacgagcaccaccctgtgctaygggctcctcattctgcttaagtacctagaggtggcaggtgtgcaacccggagagacccagaatgggaggctgcagtctggggatggctggagggtcctgg

SEQ ID NO: 21959 - DNA, 201 bp, Homo sapiens
tcctttcccgtccccaccacaggaatcttgttttctaaccggccgtgctggtggacactgcgcaattttgcacttggagcgcttaagaagttcgggttggrtacgcggaccgtcgaggcgcgcgtcctggaggaggcggcttgtctgctagacgaatttcaagccaccattgcttcggcctggccgggagagcggaagggc

SEQ ID NO: 21960 - DNA, 201 bp, Homo sapiens
ccactggaaggtatttgggtggaagaaagccagtaagcccatggggctggctgggggcaggaccacgcgttatgaccaccgtcctgttcctacccccaggrgccccgtttgaccccgtgcggctactggataatgctgtatccaatgttatctgttcttgtcttcgggaaccgctatcgctatggggacccggagttcctg

SEQ ID NO: 21961 - DNA, 201 bp, Homo sapiens
ccagtaagcccatggggctggctgggggcaggaccacgcgttatgaccaccgtcctgttcctacccccaggagccccgtttgaccccgtgcggctactggrtaatgctgtatccaatgttatctgttcttgtcttcgggaaccgctatcgctatggggacccggagttcctgaggctcctgaacctcttcagtgacaactt

SEQ ID NO: 21962 - DNA, 201 bp, Homo sapiens
ggctctggggtacctggtgctcactgtgcacctgtgtacccggcaaagcagatgtgcctgggcacaggcctggcccactcgggtatcttcctattccttayggccaccttacagaggttctgcctgctccctgtggtacgccctggcaccatcaacctcacctgcagtgcactggcctgggcagtgtccccccagacttcc

SEQ ID NO: 21963 - DNA, 201 bp, Homo sapiens
ggctggctgggggcaggaccacgcgttatgaccaccgtcctgttcctacccccaggagccccgtttgaccccgtgcggctactggataatgctgtatccartgttatctgttcttgtcttcgggaaccgctatcgctatggggacccggagttcctgaggctcctgaacctcttcagtgacaacttctgcatcattagttc

SEQ ID NO: 21964 - DNA, 201 bp, Homo sapiens
ctgggggcaggaccacgcgttatgaccaccgtcctgttcctacccccaggagccccgtttgaccccgtgcggctactggataatgctgtatccaatgttayctgttcttgtcttcgggaaccgctatcgctatggggacccggagttcctgaggctcctgaacctcttcagtgacaacttctgcatcattagttccagatg

SEQ ID NO: 21965 - DNA, 201 bp, Homo sapiens
aaagaagcaaagggaacgaagccggccgcaggagtcggaggcccctaaagggatgtagccagtgacccggcgcttcctggatagggcgtggccggctcccsggcccgcctcctttcccgtccccaccacaggaatcttgttttctaaccggccgtgctggtggacactgcgcaattttgcacttggagcgcttaagaagtt

SEQ ID NO: 21966 - DNA, 201 bp, Homo sapiens
cggcgctaaagcgtaaggttagaatggaggttcatcctgcagccaacaggagaaaagagcctaagagtcaaagcccgagagccagcctaggtcagggatgragcccagcaaaggcggggccaatgtgtggatagggcacttggaggtctggtaaagaagcaaagggaacgaagccggccgcaggagtcggaggcccctaaa

SEQ ID NO: 21967 - DNA, 201 bp, Homo sapiens
ttagtgctacaggcggatgcggtctctggccgcgggtccatggcagtcttcgaacgcttcacacgcggaaacagtgaggccccggcgctggacttgccggyccggacgctccaggctgggcgggtaaatggtagaggcgggcaaatgggggcggggcctaatagagactccagctaatgaggtgcaaacggccgagagagg

SEQ ID NO: 21968 - DNA, 201 bp, Homo sapiens
gacacccacctgcacagccactgtctgcccaaaggtacccactgagtctggggatcccgtgcgggacccgggtgcatgagatcagccagaatcagcaggtktgcgctgtgcagaccaaaacacaatcagttacccctggagcaggaaggcagctctgccttcccttaggctttttgttgttgttgtttgagacggagtctg

SEQ ID NO: 21969 - DNA, 201 bp, Homo sapiens
ctaaggcctagtggccttgtgcagggcccatgttgagacagaccctgtctctccagatgtacatttgcctgtccctcatggactggctcccgggcccgcaycaccgaatcttccgaaacttttcggagctgcgggtcatctctgagcaaattcaacgacactggcagatgcggcagccagcggagccccgcgatttcattg

SEQ ID NO: 21970 - DNA, 201 bp, Homo sapiens
atgggtcccagctctctaaactctatccatgccgcccaccaacaggtgcctggcacgcggcagcacatctcctctgcccacagtaacagcaggacccggasagccatttccaggagtagacgtcggtaatgacgacgcattttttttttggcgtcaccgaaaccacgagcaccaccctgtgctatgggctcctcattctgc

SEQ ID NO: 21971 - DNA, 201 bp, Homo sapiens
gtgcccctggggctgccgcgcaccctcaccctcgacacccacctgcacagccactgtctgcccaaaggtacccactgagtctggggatcccgtgcgggacscgggtgcatgagatcagccagaatcagcaggtgtgcgctgtgcagaccaaaacacaatcagttacccctggagcaggaaggcagctctgccttcccttag

SEQ ID NO: 21972 - DNA, 201 bp, Homo sapiens
ggatcccgtgcgggacccgggtgcatgagatcagccagaatcagcaggtgtgcgctgtgcagaccaaaacacaatcagttacccctggagcaggaaggcasctctgccttcccttaggctttttgttgttgttgtttgagacggagtctggctctgtcattcaggctagaatgcagtggcatgatcttggctcactgcaac

SEQ ID NO: 21973 - DNA, 201 bp, Homo sapiens
gcggaagggcctggtgtgggagagtcccttgcactgccaagacggggccactggaaggtatttgggtggaagaaagccagtaagcccatggggctggctgrgggcaggaccacgcgttatgaccaccgtcctgttcctacccccaggagccccgtttgaccccgtgcggctactggataatgctgtatccaatgttatctg

SEQ ID NO: 21974 - DNA, 201 bp, Homo sapiens
aaatcaaagtccaggaggccacctccaatgacccatggggcccatccagctctctgatgaccgagattgcagacctgacctacaacatggtggccttctcrgggatcatgagcatgatgtggaagcggctcaatgaccatagcaagaactggcagcatgtgtacaaggagctgctgctgctggactaccccatcaagacag

SEQ ID NO: 21975 - DNA, 201 bp, Homo sapiens
tttgtaacaaagaaaagtgatgactttatctatcagatagcagatgaaaaacattgtgaaaaattactcagaggcagaaatcaaagtccaggaggccaccwccaatgacccatggggcccatccagctctctgatgaccgagattgcagacctgacctacaacatggtggccttctcggggatcatgagcatgatgtggaa

SEQ ID NO: 21976 - DNA, 201 bp, Homo sapiens
tatctatcagatagcagatgaaaaacattgtgaaaaattactcagaggcagaaatcaaagtccaggaggccacctccaatgacccatggggcccatccagstctctgatgaccgagattgcagacctgacctacaacatggtggccttctcggggatcatgagcatgatgtggaagcggctcaatgaccatagcaagaact

SEQ ID NO: 21977 - DNA, 201 bp, Homo sapiens
ctagaggggccatcaggcggaagaagagggatggggacaggtgtgggagtccggatggggttggattttctttgctttgggccagagaagatgctagggtkaggcttggagatggagtaggaagagaagttagaataggggtgaggttggagttggggttataggtggggattgcgttgtttgaggtggataatgtgatag

SEQ ID NO: 21978 - DNA, 201 bp, Homo sapiens
actgccaaagccggtatgaaggcaggggctcagggtcctgagggagcctggttcggggggaagagctcctagatttgggggaagacggaggcagacgccasaactcctgggttctgaaagacgaggaggccggatgtcaagcccctgggttaggaaggagtgtgtgtttcaaagccttcgatctctgaaggaggaaggaga

SEQ ID NO: 21979 - DNA, 201 bp, Homo sapiens
ctccccacactgggtgctgtctgcggcccactgccaaagccggtatgaaggcaggggctcagggtcctgagggagcctggttcggggggaagagctcctakatttgggggaagacggaggcagacgccagaactcctgggttctgaaagacgaggaggccggatgtcaagcccctgggttaggaaggagtgtgtgtttcaa

SEQ ID NO: 21980 - DNA, 201 bp, Homo sapiens
gattttgagatgggcatgggtttgatttgattttgaatggtgaggatgtgggctgagttggatttaacttagtacagttgcactggagttgcatgggggtragattggatataggttgggtgagttgtattgagctgtgttgaattggggttggggttggggttgggttggctctgtttgggataaactgggctgtattga

SEQ ID NO: 21981 - DNA, 201 bp, Homo sapiens
ctacgagcgtggacgctttaactgtggcgcttccctcatctccccacactgggtgctgtctgcggcccactgccaaagccggtatgaaggcaggggctcarggtcctgagggagcctggttcggggggaagagctcctagatttgggggaagacggaggcagacgccagaactcctgggttctgaaagacgaggaggccgg

SEQ ID NO: 21982 - DNA, 201 bp, Homo sapiens
tgcacacacacacatacacattcctacctcatccttacaacaatcttcattttacagatgaggaaacagaggcacagacaggtcgaataacttactcaaartttcacagctagtacattcgaacccaggcttaaggacccatctttgtccagaccctgtatgcaagtgtctgtgacactggatgccaagactcacactaga

SEQ ID NO: 21983 - DNA, 201 bp, Homo sapiens
agggtcgggagacctcgggttgcccactctttgatctttctgtcctctacttgcgggtaaccactggcccgcactccactggcgggaaaaccactcgcccscacagcttcatgagagtgcgcctgggagagcacaacctgcgcaagcgcgatggcccagagcaactacggaccacgtctcgggtcattccacacccgcgct

SEQ ID NO: 21984 - DNA, 201 bp, Homo sapiens
ttgcccagtggagaggggtcctggtcctgtgaccttgaatgtctctaatcatgtccttaagcataatgccattctgtgtgtgtgtgtgtgtgtgtgtgtgkacatgcacgtgtgcagtgggtatacaaggccctgtatgttcacatcctctccacatgcatgagccagatccccatatgtgaaacccaatcagtgactcca

SEQ ID NO: 21985 - DNA, 201 bp, Homo sapiens
tgtgacactggatgccaagactcacactagagatgttgaatttaggtctgaacaatatccaattctgtgtgtgtgtttgtgtgtgcatgtgtgtgtgtgttgtattcatgtcttaaccatccatattcatatacacatatgaacatctgtgctgtgattcttttttttttttttttttttttttgagatggagtttcactc

SEQ ID NO: 21986 - DNA, 201 bp, Homo sapiens
ccaagaaattaattgtaacctgatgcctctcttctggagaaattggggggtggactttcattaacgttctgccacaaatgaccctcactcctgggggcccytgagacccccacgcctccagcctcccctccggctctctctgtgcactcacctacctgcctcgcgcctgcctgctgcgcccagctggggcctccaccttcc

SEQ ID NO: 21987 - DNA, 201 bp, Homo sapiens
aggcagaagcataagcctggcccaggtagtgccccttcaggtgtgcaagccaggcacggtgcttagagcttacatacaacgtctatgtgtggtgggcaccmccgacctcatttgacaagggaaggggctgtggctcagagggacggccacaacatcaaggtcaccttgggtgtcaggcaaactccagattgaactcagctg

SEQ ID NO: 21988 - DNA, 201 bp, Homo sapiens
agtcccacacctgccactccctgtctcttacagggtctttgaggggattaaatgtggttgtgtgtgaggcagaagcataagcctggcccaggtagtgcccyttcaggtgtgcaagccaggcacggtgcttagagcttacatacaacgtctatgtgtggtgggcaccaccgacctcatttgacaagggaaggggctgtggct

SEQ ID NO: 21989 - DNA, 201 bp, Homo sapiens
atgactggtttcaagtgaccacctgtctgaacctgtatccagtgcccctgtctccacccccaaccacagaggacttcttgccctctggtctgttccccttsctctctctcccagagtcttatagcaaatggggtgggggctagagttctggagaaaacaggcagcggttgtaaataaacaacagggcaggcggagcatggt

SEQ ID NO: 21990 - DNA, 201 bp, Homo sapiens
ctgagctgagtcctggggcaaccgcttccttgctgtgtgtccttgagggaactgcttcacctctctgggcttcgaatgccttctctataagacagcacccrcttgagacaataacagtgaggtctcaatagcataacagaggtaatatacatagcaagcattagacaagtgctgagaggccaacagcacagacagactcca

SEQ ID NO: 21991 - DNA, 201 bp, Homo sapiens
ctggccaaccttgactatttattataggtaattctgtgcagatgtctgacttatgttggccatctccaggatggacctgaactttcacacgtatgtccctrtgactaaatccaggtgtcatttgcaaaaaacaactaatattattaagtagctaccagggctaggtatcactcaccatacatacacacatgcacacacaca

SEQ ID NO: 21992 - DNA, 201 bp, Homo sapiens
cagtgaggtctcaatagcataacagaggtaatatacatagcaagcattagacaagtgctgagaggccaacagcacagacagactccagcttgagtcccacrcctgccactccctgtctcttacagggtctttgaggggattaaatgtggttgtgtgtgaggcagaagcataagcctggcccaggtagtgccccttcaggtg

SEQ ID NO: 21993 - DNA, 201 bp, Homo sapiens
agactccagcttgagtcccacacctgccactccctgtctcttacagggtctttgaggggattaaatgtggttgtgtgtgaggcagaagcataagcctggcycaggtagtgccccttcaggtgtgcaagccaggcacggtgcttagagcttacatacaacgtctatgtgtggtgggcaccaccgacctcatttgacaaggga

SEQ ID NO: 21994 - DNA, 201 bp, Homo sapiens; identical to SEQ ID NO: 16454

SEQ ID NO: 21995 - DNA, 201 bp, Homo sapiens
ggggattaaatgtggttgtgtgtgaggcagaagcataagcctggcccaggtagtgccccttcaggtgtgcaagccaggcacggtgcttagagcttacatacaacgtctatgtgtggtgggcaccaccgacctcatttgacaagggaaggggctgtggctcagagggacggccacaacatcaaggtcaccttgggtgtcagg

SEQ ID NO: 21996 - DNA, 201 bp, Homo sapiens
tctggcttggactggccaggtgcagcctcggtgcccagctgttcagcccgtaccctccgcccttcggaggacgacctcacccttcctttgttaagcccctygtccaccacatccgcattcccctggtctcacgggggcctttggcccagttcctgactgtgatggggagagtgtgggcatttggtctggctgtgcaaatcc

SEQ ID NO: 21997 - DNA, 201 bp, Homo sapiens
tgaaacccaatcagtgactccacagatctggcttgggggctgatctagagatggataaatatgtcctgccctggctgcctctggcttcagctgcatgtctytgaccttgaatgcccagccccgtgtctgggtgctgccccagacagcaagtccacatctgagtgttggccttctgggttggtgtctgcagctctaactcta

SEQ ID NO: 21998 - DNA, 201 bp, Homo sapiens
ggacaggaagagggcacggagtgctccctcttccctccaccttctccagcctagtccccctcagcctgtgccactcctgaatcatcttttatagcaccacrtccagcccgcacaggggcaggacagcccagggaacaaggcagtcctgtggcgctctccttgcagaaatgaccggagtctcccaatccagccagcccgtgg

SEQ ID NO: 21999 - DNA, 201 bp, Homo sapiens
ctattcagttcacttcatctcggaaatacctgacccctgccttggatccagcggccctcctgagagctgaggaaggaggaaatcctatgtgtctgctcccrgagctgccacaacccatcttcccacaactcggaacttggaaaaaggaacccaggacacgactttgcttttcttttggacctagttggtgattatactctg

SEQ ID NO: 22000 - DNA, 201 bp, Homo sapiens
acaacatccatcatatatctacaaaattgggatttttttatcgtaaaatttcatctaaaacaaaaaattcacatctgttcttggtatccattaggtgtagyggacacctctagatattcttgatgccagcatcctgtagacccgccatctcctttcccaggccatggggtgtttctgttttctattagacactgtctctta

SEQ ID NO: 22001 - DNA, 201 bp, Homo sapiens
tctttggcaaaagaaaaggtcaaagaggccggagttgacagaaagcatgggcggacttctcagatcttgtaggtggttcttaaaagaattcagcaggcttraggtgtgctctcaaagggcaactggaacgtcaaggacttggacaccaggcacagatggttcatttcccatggacaggaagagggcacggagtgctccctc

SEQ ID NO: 22002 - DNA, 201 bp, Homo sapiens
acagcccagggaacaaggcagtcctgtggcgctctccttgcagaaatgaccggagtctcccaatccagccagcccgtggacctctcttcatgcccacgggrgagtgcacacgcctgtagcattcaacagtcactctcccattgataacggtggctctcgaaaatccaataccacaaagatactttattgcacaaactttgc

SEQ ID NO: 22003 - DNA, 201 bp, Homo sapiens
tataaacagtccccatctggaggataacgtatatggttcacctgcttacaggtcctatgtgatctggcacagctgactcctccagctccacccagcaatascccacacactggcacatgctcctttctcgcagcatcactgctatcagagatcacaattttcttcactttgcaaatggagagaatgacactccaagaagtt

SEQ ID NO: 22004 - DNA, 201 bp, Homo sapiens
ctttcactctataaacagtccccatctggaggataacgtatatggttcacctgcttacaggtcctatgtgatctggcacagctgactcctccagctccacycagcaatagcccacacactggcacatgctcctttctcgcagcatcactgctatcagagatcacaattttcttcactttgcaaatggagagaatgacactc

SEQ ID NO: 22005 - DNA, 201 bp, Homo sapiens
aacaaaagacagcgttgctgagaatgtggaataattgggaccctttctaccactggtgggaatgtaaaacggtccagccactgtggaaaacaatatggcakttcctcaaaaaattaaacatagaattaccctacgaccccacaattctactgctgggtacataccccaaagaattgaaagcaggacctcaaacagatatct

SEQ ID NO: 22006 - DNA, 201 bp, Homo sapiens
ctataaagaagatttttaaaaaagcccaggtgcggtggctcacgcctgtaatctcagcactttgggaggccaaggtgggtggatcatgaggtcaagagatygagaccatcttggccaacatggtgaaaccccatctctactaaaaatacaaaagttagctgggtgtggcagcgcgtgcctatagtcccagctactcaggag

SEQ ID NO: 22007 - DNA, 201 bp, Homo sapiens
tgcctgattatgaagtaataaatattcaccataaatattttgaaaaatataaaactgtctataaaagaaatttgaaatgattgctaatctcaaaatataaagatacctgtcagtactttggcattttatcctccttgtggctgaggtcacatatcttgagactgaagcacaaaatttctataccatacagtttatagttta

SEQ ID NO: 22008 - DNA, 201 bp, Homo sapiens
ttcttaaaagaattcagcaggcttgaggtgtgctctcaaagggcaactggaacgtcaaggacttggacaccaggcacagatggttcatttcccatggacargaagagggcacggagtgctccctcttccctccaccttctccagcctagtccccctcagcctgtgccactcctgaatcatcttttatagcaccacgtccag

SEQ ID NO: 22009 - DNA, 201 bp, Homo sapiens
acttccccttcaggtctcagttgagccgtcactgacagctctgcgacaccccaaatctagctgtgcacataataccaagtgtgtcccctactgaaacactwacacaatcattctgcacatatttgttcacaacttggtatgtgtcaggccctgttagagtggctggggacacatgtagggacaaaatgccagccctcatgg

SEQ ID NO: 22010 - DNA, 201 bp, Homo sapiens
aatcactcaggtctgcactaggaagcgagttatgatgatgcccctaatctatatgaacccaaataaagccaaaacacacacaccttttaaggataaaactrtattccattaaaattagccccgcatttgtcaatatctaacagcattggactgaccctcaggccagaggctgtagctcttggaagatcctagccaggaggt

SEQ ID NO: 22011 - DNA, 201 bp, Homo sapiens
tggtttttacttgatttgctgatgttttattttttagaaaattgcagatgtgatttttaggcagctgattggaatgttctggttgctctgaataggactarctactttgttttttactgaaggacaaatattattcctacacacataaaaaacctcaaagaatgagtaatgatactgtttaaatctgcccttataactcca

SEQ ID NO: 22012 - DNA, 201 bp, Homo sapiens
agaaacttggcttgtttagaagcctgagcaatggcacccccgtccgtgctccaatacattcccagaaaaggggttatgctcccctgtggacaggataccayctccagaaaacatgtttcctcacgcatttttttttttttttttaccaagaatacaaaaactttccaccttcttccctccccgcaggccccctttcgttca

SEQ ID NO: 22013 - DNA, 201 bp, Homo sapiens
caggaggaagggactaacaagagccttctgcggtaagcacctgcatcaaacaatggcactgatctcagagggattttaaacagctgtgcataaacttcaamagtaatttgcaaccatattagtaaatgtcactcttcttcccgctagacacagcacttttaaaagagattaagcatccgcagtaagcctgccattttacaa

SEQ ID NO: 22014 - DNA, 201 bp, Homo sapiens
aaatcgcaggtcactgaaacaaaggctgatggtgcccagcaggttactcttgaaatcagaaacagaagttcatgagaggcaagaagacagaaacaacaacwgaaaaacttagagtggatcgctaacttgcaggagctgtgcagctttggctttgcaggttttagaagctctccctacgccacgtctttaaatatatgtatg

SEQ ID NO: 22015 - DNA, 201 bp, Homo sapiens
ctctttcaggttctgccctgatgtttcctggaataatgctgaggactgcctttcgggtagccgccctattcagttcacttcatctcggaaatacctgaccyctgccttggatccagcggccctcctgagagctgaggaaggaggaaatcctatgtgtctgctcccggagctgccacaacccatcttcccacaactcggaac

SEQ ID NO: 22016 - DNA, 201 bp, Homo sapiens
ttgcctgattatgaagtaataaatattcaccataaatattttgaaaaatataaaactgtctataaaagaaatttgaaatgattgctaatctcaaaatataaagatacctgtcagtactttggcattttatcctccttgtggctgaggtcacatatcttgagactgaagcacaaaatttctataccatacagtttatagttt

SEQ ID NO: 22017 - DNA, 201 bp, Homo sapiens
ccctaactttcagctgtgtacttcttttcctctttcaggttctgccctgatgtttcctggaataatgctgaggactgcctttcgggtagccgccctattcmgttcacttcatctcggaaatacctgacccctgccttggatccagcggccctcctgagagctgaggaaggaggaaatcctatgtgtctgctcccggagctg

SEQ ID NO: 22018 - DNA, 201 bp, Homo sapiens
tccatcccttttcaaatatgtgctcagtggcattgtctttttgtttgtttgtttgtttgtttgagacagtgtctcactctgttgcccaggctggaggactrtggcacaatcacagctcattgcagccttgacctcctgggctcaagtgatcctctcagctcagccttctgagtacctgggactacaggtgtgtgccaccat

SEQ ID NO: 22019 - DNA, 201 bp, Homo sapiens
tagatttatgattttgacttttgaatagactatatacttttaaaaagctgctgctgcttctagttttaggtaactttgttttgtcttttttattataagawtggcttatgccagatctttaatgttgtaaaagtatccattgctcaccagccatataggagctggccagtagggtttgggcagcagcctttggtgtggagc

SEQ ID NO: 22020 - DNA, 201 bp, Homo sapiens
acctgaacccgggaggcggaggttgcagtgaaccaagatagtgcccctacactccagcctgggacagagcaagactctgactcaaaaaaaaaaaaaaaaaagttgcttcaagaggaaacacaatgttactttgtcagaatgagctttaacttagtaattttctgttcattttaggaaaagtgggctactttgttttggctt

SEQ ID NO: 22021 - DNA, 201 bp, Homo sapiens
cacctgaacccgggaggcggaggttgcagtgaaccaagatagtgcccctacactccagcctgggacagagcaagactctgactcaaaaaaaaaaaaaaaaaagttgcttcaagaggaaacacaatgttactttgtcagaatgagctttaacttagtaattttctgttcattttaggaaaagtgggctactttgttttggct

SEQ ID NO: 22022 - DNA, 201 bp, Homo sapiens
gactggggcagaagaaggagaaaataaactcgttttgagaaatttcatgtgatgagggttttttgttttttatgctcatgtatctggttctctttgctgcrttgactctaaaaatgaggttatccactttccaaaggacaagtttcagaataagacttgaggccacatgaattcttggacagtattttacttcttttactt

SEQ ID NO: 22023 - DNA, 201 bp, Homo sapiens
ttagaataggaaaaatcttttgtaaattagaacacttaaaaaataagttaggacactggaagtcttagggaattaattctgccaaaatacaccttgcccarctcccatctttctgtaagctataaggagttgttcataatgaagaaacagacccctttaggcaacaacaaaatcagagaagagctgaagatttggggaata

SEQ ID NO: 22024 - DNA, 201 bp, Homo sapiens
tgatatggaaaggtttcaactctcaattaatcagcaactattttttttttttggcctaggctgacccgtttctcaaaattaaaagccactcatatttgggrtctgataaataagtgtttgtgggctggcaagtgtgggaacctaatgtccatttaaatcttgatttttgtataattaagttgtaaattatatatgtcttac

SEQ ID NO: 22025 - DNA, 201 bp, Homo sapiens
agccaaagtttcttttttggtccttagtttccttacctgaaaagtggaataatttctggcacatatggtttggtacatcacatgaaatatatatatgaagkgcccggttttgtgtctaatatatagtgctgactcagaattttataattcttaatgaggttaggaaaaaaaagaaaagaaatttaatgattaaatatctaa

SEQ ID NO: 22026 - DNA, 201 bp, Homo sapiens
ggaggtaatgcttttcagatgtatatggaaagttagattccaaggattaaaaaaaaatgaaattcttaaacaaattttggattccaagtccagattcaccrgctagttccaatgggtttgaggggatgacgtataatgtctgtgtttgataagactaaaagctttttgaaagtgtgtgatagccaagaggtaaacttttgc

SEQ ID NO: 22027 - DNA, 201 bp, Homo sapiens
acagctgggtgtggtggcttatgcctgtaatcccaggactttgggaggctgaggcaggtggatcacgaggtcaggagattgagaccatcctggctaacacrgtgaaatcccgtctttactaaaaatgcaaaaaattagccgggcatggtggtgggtgcctgtagtcccagctacttgggaggctgaggcaggagaatggca

SEQ ID NO: 22028 - DNA, 201 bp, Homo sapiens
caaaatcagtggtcagtatctttgagctaaagtgatatgccaagaattgagatggaagaaaaattgcacaattagtttatattggtcttactccaattatrgcctccatctagccttgggcatatccattggttcttaattgcagaattatggccacatgaaccatttcaataagtgtttatctaaattcagcacaaatat

SEQ ID NO: 22029 - DNA, 201 bp, Homo sapiens
attattttcttcttaagagagcttgatttcatcaaaagacaggaagcagaaagaaagaaaatagaagatttggaaaaagctcatcttgtggaagtgcaagscctccaagtgcgggtaagttgtgttccctaagacactaaataataagatggttttgctgtacttggaggggagcgctagtttagagttttataaatggat

SEQ ID NO: 22030 - DNA, 201 bp, Homo sapiens
atttttgttaggtatatttgatcaggttaaggaagttctcttcaattgccatttatttatttgccatgtgttaaaaaattgtgaatggatattgagtttcrttgaacttttaaaatacatctatatagatataatcatataagatttctcctttaatgatattaataggtacttttcatgttaaaccacttgaattcatgg

SEQ ID NO: 22031 - DNA, 201 bp, Homo sapiens
tggatagtgtcttctttttgtccatgaattaaaaggcaattaatttaaaaagatcattttttctgagacaaggtctcactttgttacccaggctggaatgyagtggtgcaatcatggctcactgcagcctcaacttcctagacttcagtgatctttccacctcagcctcccctagtagttggggccacaggcatgtgccac

SEQ ID NO: 22032 - DNA, 201 bp, Homo sapiens
ctttgggtcttctttaatatatttattatataattatacaacttttgtttaaaacattttttgctactgttgtggatagtgtcttctttttgtccatgaawtaaaaggcaattaatttaaaaagatcattttttctgagacaaggtctcactttgttacccaggctggaatgtagtggtgcaatcatggctcactgcagcc

SEQ ID NO: 22033 - DNA, 201 bp, Homo sapiens
atccatcttttgcatcttgtaacttctctttgtgcatcctggtaatccttttgtcattctcctggcatttatagcatacttgaaacttgggactccatggwctttcagaacttttccaggtttaaacagagagctctggggacaatgtatttcccaagagagagaaaggctaagtactccaattattattattcattttgt

SEQ ID NO: 22034 - DNA, 201 bp, Homo sapiens
tagagtaagtgtgatgtggtgctcagaatgtatattctgttgatttggggtggagatttctgtagatgtctgttaggtcacttggaccagagctcagttcragtcctgaatatccttgttaattttctgcctccttgaggtgtctgatatacacagtggggtgttaaaatctcccactattattgtgtgggagtctaaatc

SEQ ID NO: 22035 - DNA, 201 bp, Homo sapiens
aaggttatttttagaaatgactgggtgcccttttgcaaaaactgttttgaactatttatatgaattgtagtatcaaatagtgccaaatttggatacaaatrtccttttaggcagcaaagtactatttaaagtatgaattaaagtatttggaaaatgtttgcccttatcgtttaacacattcatgttttactcgtgaattaa

SEQ ID NO: 22036 - DNA, 201 bp, Homo sapiens
tatgaattgtagtatcaaatagtgccaaatttggatacaaatgtccttttaggcagcaaagtactatttaaagtatgaattaaagtatttggaaaatgttygcccttatcgtttaacacattcatgttttactcgtgaattaagcacaaatcgtagaacagatttgtattggtacagccaatgtatttgagtggagcccaa

SEQ ID NO: 22037 - DNA, 201 bp, Homo sapiens
ttaatcaatattgttgactattttataaatatttcaatgcctactatgtgcctaaaagtattctatgagaaatgtattgaatctactttttgaatcttcaytgggtttcgggatagaaactttagagtcaaatgaattttctgggattcactgtacatcaactaatcccctagtcttaatttaaatcttttcaacatcagg

SEQ ID NO: 22038 - DNA, 201 bp, Homo sapiens
ccctttcttaatgagactttctaaattttaatatgatggataactcaattttaaagtatagtttctattttttatagcagctttattgagatataattcayataccataaaatttttagtatacttgcagaattggtcagccacaatcaattttagaaatttccatcaccccatccctggctcacattagccacaggcagc

SEQ ID NO: 22039 - DNA, 201 bp, Homo sapiens
tttgaatatttgcaatactttatgtattaggcaagcctttgtgacatattcaacaatatctttacaccagatagtagagaataagcagaaaaaccacaatragtgatgcacataggtcttggcctcatgtgggggcattgtggggaacctggcattggcatatcccattggcatatccacctgcacatgtgccattttatt

SEQ ID NO: 22040 - DNA, 201 bp, Homo sapiens
cctgccacagagggagatactcttacaaatggagcttttcttcatagatctaagtttcccttacaaaacagtatcttctactctgttttttttttttttaattatacttttaagttttagggtacatgtgcacaacgtgcaggttagttacatatgtatacatgtgccatgctggtgtgctgtacccattaactcatcatt

SEQ ID NO: 22041 - DNA, 201 bp, Homo sapiens
tgaaggaaaagtgcaccttatttgacctcagctgggaacgtgcccattgggcaactcaaagtttttgtcactctgacctgtcagcaaatgccaaaaaagcyctacagatttgaggtaacaaataagttttagcaagtgggcaacttttcaaatattgaaatccacgaataatgagaattgactacaagtagttttgccaaa

SEQ ID NO: 22042 - DNA, 201 bp, Homo sapiens
ggtcagcaacgcacttgaggaggcaatctgatgcttagcagagcttaagcactgtgctgggagactccctgctctcttcagagctggcaggcaggagtgtktaagtctgctgaagctgcgcccagagccaccctttcccccaggtgctctgtcccaaggagatgggagttttatctataagcctctgactggggctgctgc

SEQ ID NO: 22043 - DNA, 201 bp, Homo sapiens
gcagtgacctctaccttggccctgactcagctggtatgatggttctttgtgcaaatattttctcaaccttcaatttgtcacaagtagctaagcattatccygtgaataatagatttatgattttgctagcattagcacagtgactaggatactaacttattccagctgtgtttcctgggtttgagttttcttcccaggaac

SEQ ID NO: 22044 - DNA, 201 bp, Homo sapiens
ggcacaaatctactttctgtctctatacatttggctctcctggccatttcatgtaaatggaatacagtatgtggtcttttgtgactggcttttttttttttaactagagaaacgttttcaaggttcattcatgttgtagcatttatcagtacttaattcatttttattgcaaaataatattccattgacttgataatacca

SEQ ID NO: 22045 - DNA, 201 bp, Homo sapiens
cattactttttagcacaagaagaatagcatcactaccaaaaccagctgagatatcttattttatttatttatttatttatttatttatttatttatttatttagatagagtctcactctgttgcccaggctggagtgcagtggcatgatcttagctcttggcaacctcggactgccgggttcaagcgattcttgtgcctca

SEQ ID NO: 22046 - DNA, 201 bp, Homo sapiens
gcattactttttagcacaagaagaatagcatcactaccaaaaccagctgagatatcttattttatttatttatttatttatttatttatttatttatttatttagatagagtctcactctgttgcccaggctggagtgcagtggcatgatcttagctcttggcaacctcggactgccgggttcaagcgattcttgtgcctc

SEQ ID NO: 22047 - DNA, 201 bp, Homo sapiens
aagaaattgttgatcgtgtgcaactgtttgagttgcattactttttagcacaagaagaatagcatcactaccaaaaccagctgagatatcttattttattwatttatttatttatttatttatttatttatttatttagatagagtctcactctgttgcccaggctggagtgcagtggcatgatcttagctcttggcaacc

SEQ ID NO: 22048 - DNA, 201 bp, Homo sapiens
gctacagtagcagtgttgagtcgttgtgacagagactgtgtatctcacaaacctaaaatattttactctgtggcccctgaaaggtaaagaaagcttcctgwtgcctggtctagaagtatattttcttatactcaaaattgctggataaactctgaaaatggcttcatcattggttgccatttatctagaatttttaaaaag

SEQ ID NO: 22049 - DNA, 201 bp, Homo sapiens
atttcacacagtagacactttaatttacaacttgctgcactgcagcacttttctaggccttttactatgtaataaggcattcttgtagctgctgaggcttyacaaatatagatacactttcttagttcagattttttctttcttttcaattttcagttgcaaatcaaacatgcagttacagaagcagagattcaaaaattg

SEQ ID NO: 22050 - DNA, 201 bp, Homo sapiens
tttagatttctctaatggctaatgattttgcatctttttattgcctttttttgcaatcatatgtgtatcttattttgtgaaaaatttgcttaaatattttytgattttttaaaaattaagttgttttcttactgttttaagagttatttattctgaatataagtaatatatttattctgaatattttgttgaagtccgctt

SEQ ID NO: 22051 - DNA, 201 bp, Homo sapiens
aaaacgtgtagaaaagctggaacttttcccagtggagctagagaaaggttcgtgagtgctacagtgttaatatcattatgttgctatgttaataatacagrattatttttccaaaatgtagccttttttctaaggattggataaaattttaattctaacagaggatcttatttattaagtttcaaaaatagttgatatgga

SEQ ID NO: 22052 - DNA, 201 bp, Homo sapiens
tattttattgaggatttttgcatcaatgttcgtcagggatattggtctaaaattctctttttttgctgtgtctctgccaggctttggtatcagggtgatgyttgcctcataaaatgagttagggagaattctctctttttctattgattggaatagtttcaaaaggaatgggaccagctcctttctgtacctctgatagaa

SEQ ID NO: 22053 - DNA, 201 bp, Homo sapiens
cccactgatttcttggttatttcttggttacaggctgtcatggtggtcacctgatccttacctgatgttactggttaccttgagattttatcagtgtctgyggtctcttcatcagttctctccaaaggtttctctcactgattatctttcaatattcttagacttgaatgaagcagtcccagagacagagcgcctggattc

SEQ ID NO: 22054 - DNA, 201 bp, Homo sapiens
ttcagtatgatactggctgtgggtttgtcataaatagctcttattattttgagataggttccatcaatacctagtttattgagagtttttagcatgaaggsctgttgaattttatcgaaggccttttttgcatctattgagataatcatgtggtttttgtctttggttctgtttacatgctggattacatttattgatttg

SEQ ID NO: 22055 - DNA, 201 bp, Homo sapiens
tttgtattatagagcatacaatccaaatatgagctagataaggcataaaacgtgcaagtactacatacagtgtttctaattatattacagctttcatctaygtggtgttccacattttatatttaagcaagagcttataagattgactctctcccagttatcacaactaatgaactcttaatgggcagctacaaatataga

SEQ ID NO: 22056 - DNA, 201 bp, Homo sapiens
gtcatctgcaaacagggacagtttgacttcctcgtttcctaatcgaataccttttatttctttctcttgcctgatttccctggccagaacttccaacactrtgttgaataggagtggtgagagagggcatccctgtcttgtgccagttttcaaagggaatgctttcagtttttgcccattcagtatgatactggctgtggg

SEQ ID NO: 22057 - DNA, 201 bp, Homo sapiens
tttttccaattctgtgaagaaagtcattggtagcttgatggggatggcattgaatctataaattaccttgagcagtatggccattttcatgatactgattyttcctatccatgagcatggaatattcttcaatttgtttgtgtcatcttttatttcattgagcagtggtttgtagttctccttgaagaggtcgttcacatc

SEQ ID NO: 22058 - DNA, 201 bp, Homo sapiens
tgttacaagttgctgtgattattacagagaagagtttctttttttaatttaatttaattttttttaattatactttaagttctagggtacctgtgcacaaygtgcaggtttgttgcatatgtatacacgtgccatgttggtttgccgcacccattaactcatcatttacattaggtatttctcctaatgctatccctcccc

SEQ ID NO: 22059 - DNA, 201 bp, Homo sapiens
gctggagttcagtggcatgatctcggctcactgcaaccactgcctcccaggttcaagcgattcttctgcctcagcctcctgagtagctgggactacaggcrcgtgccaccatgcccggctaatttttgtatttttagtagagatgggatttcaccatattggccaggctggtcttgaatccctgacctcatgatccacccg

SEQ ID NO: 22060 - DNA, 201 bp, Homo sapiens
acgccatcacacctggctaatttttgtatttttagtagagacagggtttcaccatgttgttgaactcctgacctcatgatctgcccacctcggcctcccaragtgctgagattacaggcatggcatgagccactgtacccggcctctttccagtttttctatgcaactatatgcatatgtttaccactagaaaatgtattt

SEQ ID NO: 22061 - DNA, 201 bp, Homo sapiens
gtattgttagtattttggattttggctattctaatacatgtagtgggtatcatgttgttgttttaatttgcagttccctaatgacatatgtggagcatctkttcatctacttatttaccatgtgtatatcttcattggtgggatatatctgtttaatcaaattgattgttttgttattgttggcttttaagaatttttaaa

SEQ ID NO: 22062 - DNA, 201 bp, Homo sapiens
atttcttaaaccttggtaaaattgatcccacatttgtggctaaccttgtaagtattatggggaaggagaccctccaattcattttaaattgtgattatatrgcatttgcataggcctgagatgttttccttaagttcgactattgtgtatatgatattctaatgtgttacttaaaatatgctttcaaacactgggtataat

SEQ ID NO: 22063 - DNA, 201 bp, Homo sapiens
tatttcttaaaccttggtaaaattgatcccacatttgtggctaaccttgtaagtattatggggaaggagaccctccaattcattttaaattgtgattatayagcatttgcataggcctgagatgttttccttaagttcgactattgtgtatatgatattctaatgtgttacttaaaatatgctttcaaacactgggtataa

SEQ ID NO: 22064 - DNA, 201 bp, Homo sapiens
ggaagattgaggctgcagtgagctgtgattgagccaccacactccagcctgggcaacagagcaagaccctgtttcaaaaaagaaaaagaagggctgggccygaaatctatgattttcatatctgtattatatacagtttcttgcttagcgtctagaattacctattatttaggatagattcctaaaaaaatataattttat

SEQ ID NO: 22065 - DNA, 201 bp, Homo sapiens
aaacctgtaagtaagtcttttgaaaaataaaggctggctggaagattgaggctgcagtgagctgtgattgagccaccacactccagcctgggcaacagagyaagaccctgtttcaaaaaagaaaaagaagggctgggcccgaaatctatgattttcatatctgtattatatacagtttcttgcttagcgtctagaattacc

SEQ ID NO: 22066 - DNA, 201 bp, Homo sapiens
gctggttcttagcaaagatcgatatttttgataagcctctaaccaggctaagaaaaaaagagagatgacacaaattagtaatattaaaaatgagagagaamaattcactgtggatggcatgggcactaaaaggacaataaaagaatattatgagcccctctgtgcccacaagtttgacaaccaagatgaaatagaccaatt

SEQ ID NO: 22067 - DNA, 201 bp, Homo sapiens
atgttttattcttttttttttttttttgagatgaagtctcgctctgtcacccaggctggagtgcagtggtgtgatctcggcccactgcacctctgactcckgggttcaggcgattctcctgcctcagcctcccgagtagctgagactataggcatgtgccaccacgtctggctaattttttatatttttagtggagacggg

SEQ ID NO: 22068 - DNA, 201 bp, Homo sapiens
tgaaggatgacttgggtatcttggtcttctttttcattttcttttttttttttttttgaaatggaatcttgctctgtcacccaggctggagttcagtggcrtgatctcggctcactgcaaccactgcctcccaggttcaagcgattcttctgcctcagcctcctgagtagctgggactacaggcgcgtgccaccatgcccg

SEQ ID NO: 22069 - DNA, 201 bp, Homo sapiens
aaagataataagcactaatgttaaatgctacttagcaaatggatgcaaagctttgacagtaattttaggttatttctagatagtgtggacttaaaaaaagytttttagaaagctgttttcagttgacttagagttacttgtaatctgttattatcaaggtcaccccatggaagatctctgaatacccaatgaggcaagtgt

SEQ ID NO: 22070 - DNA, 201 bp, Homo sapiens
agcctcccaaagtgttgggtttacaggcatgagccactgtgcctggcctacgttttttttaaaaaaaacttattattacagataattatcttgtgggcatmttttcaccttgtattacagataattttcttttcaacctccagctggtgttattttcaggtgaagtcttcatcttaggctattatacatacatatgtacat

SEQ ID NO: 22071 - DNA, 201 bp, Homo sapiens
ccactgcacctctgactcctgggttcaggcgattctcctgcctcagcctcccgagtagctgagactataggcatgtgccaccacgtctggctaattttttrtatttttagtggagacggggtttcagtgtgttagccaggatggtctcgatctcctgacctcgtgatccacctatctcagcctaacatgttttattcttaa

SEQ ID NO: 22072 - DNA, 201 bp, Homo sapiens
tacggcattgtttattatgttggattttagttctttggtgagtcatgcataatacattatctgttatatttaacatgttttattcttttttttttttttttgagatgaagtctcgctctgtcacccaggctggagtgcagtggtgtgatctcggcccactgcacctctgactcctgggttcaggcgattctcctgcctcag

SEQ ID NO: 22073 - DNA, 201 bp, Homo sapiens
tattttttacctaatttctacacaattagtttcttttgattttgcactgttattcaatgcaatacctgaaagaaataagttttttttttttttttttttttgtcaaggctcacacaccagaagaactaatgataaatattctttgtaatcttctagaaattttagatgcatatataaatacatatatatataaataaatac

SEQ ID NO: 22074 - DNA, 201 bp, Homo sapiens
aagatatatgtaaatgagttcattacttataagagatattacataaaccatttaaatgccaggaaacagctacctctgaaatggtatctttggattatgargacgaatttgaagccattctttctcccagttcctaggagtgacttatgattctcttttttccaaaaatgatagcaagccagtaaattatagctaaaaaag

SEQ ID NO: 22075 - DNA, 201 bp, Homo sapiens
ggtagcttgaagctgttcttttagctttgctgcagatttataaaatgttcaacatttccatttacctctggacaggctgtagttttttttgttttttttttgttttttttttttttaaggattaagatccttgaagctagaggtctttgaaactgcatctgagtggaagaggtctagtgtaaagtgactcattcttaaaca

SEQ ID NO: 22076 - DNA, 201 bp, Homo sapiens
tatggcttaaattaatctgaattctaatttaccttttaccttgagcttggctgctgttttcaatttatatgcattttatacattaactgctaccctcaatytcctgtcaactttgtagtaagtgatactctgtcaaatgctactctatgatgcatttaaataaagataaaaggtcaatctaggcttttctaaagttaccat

SEQ ID NO: 22077 - DNA, 201 bp, Homo sapiens
ggggcaccttccagatgccagtcagatctctcctgtatgaggtatctgtcgacccctgctgggaggtgtctcccaatcaggaggtacaggggtcagcaacscacttgaggaggcaatctgatgcttagcagagcttaagcactgtgctgggagactccctgctctcttcagagctggcaggcaggagtgtttaagtctgct

SEQ ID NO: 22078 - DNA, 201 bp, Homo sapiens
attgatacttgtgtatgcttcacgaagttctcgtgctgtgttttttagctccatcaggtcatttatgttcctctctaaactggttattctagttagcaatwcatctaaccttttttcaaagttcttagcttctttgcattgggttagaacatgctcctttagcttggaggagtttgttattacccatgttctgaagcctac

SEQ ID NO: 22079 - DNA, 201 bp, Homo sapiens
cactgcaagctccgcctcccgggttcacgccattctcctgcctcagcctcccaagtagctgggactacaggcgcccgccactacgcccggctaattttttrtatttttagtagagacggggtttcaccgttttagccgggatggtctcgatctcctgacctcgtgatccacccgcctcggcctcccaaagtgctgggatta

SEQ ID NO: 22080 - DNA, 201 bp, Homo sapiens
aagaggtccttcacattcctttaagttgtattcgtaggtagtttattctctttgtagcaattgtgaatgtgagttcacgtattatttggctctctgtttgtctcttattggtgtataggaatgcttgtgatttttgcacattgatttttttatcctgagattttgctgaaattgcttatcagcttaaggagattttgggct

SEQ ID NO: 22081 - DNA, 201 bp, Homo sapiens
gaagaggtccttcacattcctttaagttgtattcgtaggtagtttattctctttgtagcaattgtgaatgtgagttcacgtattatttggctctctgtttgtctcttattggtgtataggaatgcttgtgatttttgcacattgatttttttatcctgagattttgctgaaattgcttatcagcttaaggagattttgggc

SEQ ID NO: 22082 - DNA, 201 bp, Homo sapiens
tgaagaggtccttcacattcctttaagttgtattcgtaggtagtttattctctttgtagcaattgtgaatgtgagttcacgtattatttggctctctgtttgtctcttattggtgtataggaatgcttgtgatttttgcacattgatttttttatcctgagattttgctgaaattgcttatcagcttaaggagattttggg

SEQ ID NO: 22083 - DNA, 201 bp, Homo sapiens
ttgaagaggtccttcacattcctttaagttgtattcgtaggtagtttattctctttgtagcaattgtgaatgtgagttcacgtattatttggctctctgtttgtctcttattggtgtataggaatgcttgtgatttttgcacattgatttttttatcctgagattttgctgaaattgcttatcagcttaaggagattttgg

SEQ ID NO: 22084 - DNA, 201 bp, Homo sapiens
tcaacccaacaacaacagtgtaacaaatgggtaaaagaaatgatttgacaatttgtggaagtagacaggtgacttacaaacatatgaaaaaatgtttaccygcactagtaatcagtgaaatgcaattgaaatcacattgtaatatctttttacagctgtatgattggcagtacttaaaggatctgagcataccaagtattc

SEQ ID NO: 22085 - DNA, 201 bp, Homo sapiens
ttacagaagacagaatgggagacactataattttgctttggggtactttaaatctgaggtgctatcaagtcacctaactggtccagaagtatgaactgtcyatacagaatcaggaacccaggtaggaggtacagatgattgctgcatttgattttttgcttacagagcattcacctatttattttaataaagaaattacca

SEQ ID NO: 22086 - DNA, 201 bp, Homo sapiens
ttcaacttaattttaatagctaatggcaattgccatgtatggatggatatgagaaagttttcagaaaaatgagatatttatcttgaggaagatttggctgktgggaggaggagacataatagcttttttcagatattcagtgtaagtgagtttgcacaagttttaaaatctttggaagctaacttgatatcagcaagcaaa

SEQ ID NO: 22087 - DNA, 201 bp, Homo sapiens
gattcatgcttctctgcaacatggatgaacctggaggacattatactaagtgaactaagtcaggcacagaaagataaatactgtgttctcactcatatatrggagctaaaacatgagcggatagaggtagagagtagaattgtggttattagaggctaggagaggttggttaacagatacaaaattatagctagaagagag

SEQ ID NO: 22088 - DNA, 201 bp, Homo sapiens
tcaaggctgtttcattctgtttccaggtaaaatttggggcttgaggtactcttcccaaggtactcaagacctcagagtttaatgtttgcttttcatgatastctttaccccactctcccttccattcagaggtccagtcacccctgggggattttcatgggagagtgtaaacttctgtactggagaagcttaaaagtctca

SEQ ID NO: 22089 - DNA, 201 bp, Homo sapiens
ccttgtgcttccccttcttagcatctagtattttctgttctactttacttctatgagatcaacatttttttagcttcctcatatgaatgagacatgtggtrtttaactttctgtttttggcttattttacttaacataatgtccgccagttccatccttgttattgcaaattacaggatttccttcttttttatggctgaa

SEQ ID NO: 22090 - DNA, 201 bp, Homo sapiens
tagtttacctttctttgggctagctcacatggattacagaagtgagcttactatttatatgaacaaatataaattgacctttactttctctttttttcccrtagttttgcaagaaaaaacttacttttatgatttttacatgtattaatctttacatttccttttcctcctttttgtacattaactgctgaattcagagtt

SEQ ID NO: 22091 - DNA, 201 bp, Homo sapiens
ttttaaaatttcaattttcggtgctagtatctagaaatgcagtgggttttaaaaatacttttattttatatcttttaatcttactggactctattagtagmagtagcttggaaattttgtcagattttttacccagactgccatgttgtctgtgaataaagatacttttacatcttccttttctctttgctcgagttactg

SEQ ID NO: 22092 - DNA, 201 bp, Homo sapiens
tgaaactagcagagtggtaaaattaactaaaagcttaactatctaaaaaacataataatatcttctagatagaaatatgggtcccagattatccattcctsaaatgctctataggattgtgtatttatgtggcaatattaaaaaacgtggaacagataacttgctataaataagccacaacttagaattcatgcttttagt

SEQ ID NO: 22093 - DNA, 201 bp, Homo sapiens
tagtatctagaaatgcagtgggttttaaaaatacttttattttatatcttttaatcttactggactctattagtagaagtagcttggaaattttgtcagaktttttacccagactgccatgttgtctgtgaataaagatacttttacatcttccttttctctttgctcgagttactgaactggctaaagcctccagctgaa

SEQ ID NO: 22094 - DNA, 201 bp, Homo sapiens
cctgactaccttgtcaaataccaaaaagttcagttttgcagccagagaatatcctgtttgaaagactttgtgatgactcattttatgggtcaacgttggtrggccacagtacccagatatgtgggtaaacattattctagagtctatgaagtatcttttagatgagatgaacatttaaagcagtgggctaaagcagattac

SEQ ID NO: 22095 - DNA, 201 bp, Homo sapiens
aagcctaacaaatttatttaaccgaagttttatctgacacaagagccctcagaaatgaagacttaaagacccagggaaaactgtgtattttttttttcatwggtgcgatgaacaaataaatagtcatgtagaagtatgattggactgaaaagatataatctattgggatcatagaggaaacttagaaaggcctgtttgttc

SEQ ID NO: 22096 - DNA, 201 bp, Homo sapiens
gtgaaatgaatgatgttgaagatacaggggttagccttagaaatattttatgtaactagactttgggtcaggcgaggcttgcagattaacagcttttggartaataacctaactagtactccatttgatcctgttttgtggtatgtaggattctggtgagtgatccacttagaaggttaaatgtatcctactgtagaatgt

SEQ ID NO: 22097 - DNA, 201 bp, Homo sapiens
atgcacttaagttatatagaaataattttatccttttggatcttgctttaaaaagttttgaacagtacaagaacagcatctggtccatggctcataattayttcactagtgagacaaagtccttctgaatacccagtctatttctccataaattacaatgttttccagtctggtagaaggactggatatatcttggggaaa

SEQ ID NO: 22098 - DNA, 201 bp, Homo sapiens
ctatcatttgaccaagcactcccactactgaatatctccccaaaggaaaagaaatggtatcaaaaagagacttgtgcttgtatgtttaacagaatactatycaatggaaatagtcttggaaatagcaaagtcatggaatcaacctaagtattcatcaatagatgactggataaagaaaatggggcatgtatacactatgga

SEQ ID NO: 22099 - DNA, 201 bp, Homo sapiens
attacccattgcttgtttttgtcaggtttgtcaaggatcagatggttgtatgtgtggcattatttccgaggcctctgttctgttccattggtctatatatytgttttgggtagcagtaccatgctgttttggttactgtagccttgtagtatagtttgaagtcaggtaacatgatgcctctagctttgttctttttgctta

SEQ ID NO: 22100 - DNA, 201 bp, Homo sapiens
atttatgaatcacattttaaaattcatatctgaaattttttattggatgttggatattatgactattatactattgtctagattttattatcttcttttamattttttgaaatttgttttgagtgctgtcaaagctactgtggtttagcttcattttttgaggcttttatcaaaacttcgttatagtgggtctggtgacac

SEQ ID NO: 22101 - DNA, 201 bp, Homo sapiens
tcagaactcaagcatcttgcagcccagtgagaccactgggaattatttagcttgcagctccccagtaataggtcacccagtctcatagaattttctcctcygtgtatatgtgtaacttagtagttagctattggcgtaaggggcctctgtgaagatttctggagtttttctctgccaagctctgagctcactagtactcag

SEQ ID NO: 22102 - DNA, 201 bp, Homo sapiens
aaatggtatttctagttctagatccttgaggaatcaccacaatgtctttcacagtggttgaactaacttacactcccaccaacagtgtaaaagtgttcctrtttctccacatcctctccagcatctgctgtttcctgactttttaataattgccattctaactagcatgagatggtatctcattgtggttttcatttgtat

SEQ ID NO: 22103 - DNA, 201 bp, Homo sapiens
tgtccctgcaaaggacatgaacttatcctttttatggctgcatagtattccatggtatatatgtgccacaatttctctatccagtctgtcattgatgggcrtttgggttggttccaagtctttgctattgtgaacattgctgtaataaacatacgtgtgcatgtgtctttttagtagaatgatttgagtatatacccagta

SEQ ID NO: 22104 - DNA, 201 bp, Homo sapiens
tacataggtatacatgtgccatggtggtttgctgcacccatcaacctgtcatctacattaggtatttctcctaatgctatccctcgcctaaatccccaccygctgacaggccctggtgtgtgatgttcccctccctgtgtccatgtgatctcattgttcaactccaaattatgaatgagaacatgtggtgtttggttttct

SEQ ID NO: 22105 - DNA, 201 bp, Homo sapiens
tctatacccctattctattcatttgtagaatgttgtctgtaatacttgattggattttctatttctttggctgttaagataattaaataccttttcaccaagctttaaagatccttgaactatatggacttctttctctctctctctttttttttttttttcttcatgttcttcctatctggcagaagcacagaaatctta

SEQ ID NO: 22106 - DNA, 201 bp, Homo sapiens
ggtctatacccctattctattcatttgtagaatgttgtctgtaatacttgattggattttctatttctttggctgttaagataattaaataccttttcaccaagctttaaagatccttgaactatatggacttctttctctctctctctttttttttttttttcttcatgttcttcctatctggcagaagcacagaaatct

SEQ ID NO: 22107 - DNA, 201 bp, Homo sapiens
tggtctatacccctattctattcatttgtagaatgttgtctgtaatacttgattggattttctatttctttggctgttaagataattaaataccttttcaccaagctttaaagatccttgaactatatggacttctttctctctctctctttttttttttttttcttcatgttcttcctatctggcagaagcacagaaatc

SEQ ID NO: 22108 - DNA, 201 bp, Homo sapiens
tctctctggctgcccttaacattttttccttcatttcaactttggtgaatttgacaattatgtgtcttggagttgctcttctcaaggagtatctttgtggmgttctctgtatttcctgaatttgaatgttggcctgccttgctagattggggaagttttcctggataatatcctacagagtgttttccaacttggttccat

SEQ ID NO: 22109 - DNA, 201 bp, Homo sapiens
agtctagctgcttgggtgtcatgcttgacaggggttaaaacttgaagttccttatctcttaaacatttttatgtttctgagttcaatcctgttaagattaytgacaacattcttggaagactgtgtcctaaggaaggaagaattttgaaaataaatgattttgctagatagaatgggagaaaagaaattcttggagtacat

SEQ ID NO: 22110 - DNA, 201 bp, Homo sapiens
ttcaagagaaaattagctgcaattaagaaccttctttttattgtaaacatattgagtgttaatattctttggttctagtttatttctaaacaaaaacctgygtgccatagaagtagaattttagatcttttattttctatgtaaaggttgatttcttaactttattcatgttgaatttcatattattctatttaatttatc

SEQ ID NO: 22111 - DNA, 201 bp, Homo sapiens
ccagagatgaattcaagcagtctaagttaactactcttcatgcttggcacatggttgaaagaacaagaagtatatcttgtcaatagcgattgcaaatcctmtaaaatcacctaagtgtatggattttctggatgccttagcacatagccatgtatgtttgtgtgcatatacattatttgtttttgtagatttatatataaa

SEQ ID NO: 22112 - DNA, 201 bp, Homo sapiens
cctcccaaagtgctgagattataggcgtgaaccactgtgcccagccgatggtataacatttaaattggatttccttttaaatttttatgttttatgacctrtgcttcataaccaggtaaatgaaatatgtcaaatattttaatatactttgtaaaatcaaataatgaagatttgttgaatgaaccccttttctaaaatcca

SEQ ID NO: 22113 - DNA, 201 bp, Homo sapiens
tgacagcagattatttcagatgtttactggtatttatttgtaatagaaatatttaaagtttcttgttttttgttaatttaattaattttttttgagacaakgtcttgctctgtcaccctggctgtagtgcagtgatgcagtcatggctcactgcagccctgacctctggggctcaagtaattctcctgcctcagcctccca

SEQ ID NO: 22114 - DNA, 201 bp, Homo sapiens
taatctagcgtcatttcccagtcacttcaggaagcccttcagtagcatactcctgacagatgatgtttcagcttctgcttgaataattctaccgatggagrgtttattactttggaaggtaaaaggaaagttagaaggaggggcatgctggtgtgtgtagggaggtggtgcactcactcttctttttatttaattttaatt

SEQ ID NO: 22115 - DNA, 201 bp, Homo sapiens
tactgtaaccatctataagatgagtgatttgaagcagatatttatttagtttactatgtattgtctgttggagcatattactatatagtctatattactawtaaatatcattaactagtaataataatggtaacatcgagaggtacttgatattctgtcaggttggacaagtgtgcctcttgaagccttgaatttcttacc

SEQ ID NO: 22116 - DNA, 201 bp, Homo sapiens
agaaaacaaattaaaatgcttgaatcacatgatttaccaaaccagttaaacacaaatccagaagcaagaggaaagctatggagtaagttaacacacttcargttcaaaccaggttggaaggaccacgctacctgtcctggataaacaatgttcctatgtcccatctttctttcacataacccttccccattaatgatgtgg

SEQ ID NO: 22117 - DNA, 201 bp, Homo sapiens
ttttagatacaaggatatagagtggttcattattcaaagattcatccacatacaatttaaaggaaaagcccttaaattttttaaatttcatgtcaaattgktatgaaaagatgtcaatttggtaacatttaccactttaaagaaagactgtaaattaacacatgatggaagctgcctaaatttatgcaaactataaattta

SEQ ID NO: 22118 - DNA, 201 bp, Homo sapiens
agttagaaaataagctttgggctccatagtatgacaatagtgtcttccataataacatagtccctctgtctttgccgtcattttatggctgttttgccttrgtgctttgcctgtccctaggaatgtatggagaggaagacagggtgcagctgggttctcgatgggtcagccacaggaataataagtggcctttaaggatga

SEQ ID NO: 22119 - DNA, 201 bp, Homo sapiens
tctgcaactggattttcagctctgcaaatctgagtaattttccagttaaaagcaatgagaggagcaatggaaggaagaaagagaattctaccaagacctgwgtctaggcagagaaaatggatttagaaaccaagaagtaattttcactcaagatagttgcaggaagaaattatttaatggtgtgacagtatggagatttca

SEQ ID NO: 22120 - DNA, 201 bp, Homo sapiens
gggattacaggcatgagccaccgcgcccagccaagataccttatttaaattaagattcatcatgcagttctgatgtagttcttttgtaagtagtgcggcaraatttttcatacccatcattgtgtcctaaacactcaaaataatgcttcatacatgatataggtgttcaggaagtgtttgtagaatgagaaaataaatctg

SEQ ID NO: 22121 - DNA, 201 bp, Homo sapiens
aaattatatgtttgaatatgtgtactcttacgcctaaaataattcattgcattatttagagaatctaggttttaaggcagagtgactattcaataatcaarttgttaccttttcttgagaccacagtgaattaccaacagtagtagtaaaatgatgctaaatgcatgagccttttggaggatctcattagatacccttact

SEQ ID NO: 22122 - DNA, 201 bp, Homo sapiens
tccaggtgaaaatttcctacctattggaaatataatttgtagtttttgactgatttatcttatattgataaaagatagggcatttaggaagaatttttatrcatattattttgttttctccctcaacttctttgtaaggtaggtgaacagatgaggtaaatgatgcagataggctaatcgtctctctccaagtcacacagt

SEQ ID NO: 22123 - DNA, 201 bp, Homo sapiens
ggaaagagaatattagtgaacaatgacttctactttgagactttgaacaccaagagaggcaggcctcagatgatcaaggtaatgttaattggctaaaaaaattgaggaatattttttgtgagaatatcaaggggaaaaagaggagacagggacatttatttatgattcatatcaaactggaaggtagttttcaattgtgac

SEQ ID NO: 22124 - DNA, 201 bp, Homo sapiens
agaggtagctgaggtgggtgtctccaggtaggacacgtgaagatgggaataagttcaggggacctgagaaaggtgcttggtgcctaaagtcagaggaaagycaaattagggattccttttagggaggtgaggagagcaacttagacgtgatgttgcatttgtgagcttggaacccagagttaaaagaaaatatacagaatt

SEQ ID NO: 22125 - DNA, 201 bp, Homo sapiens
ttaaaatagggagaggtaactttcaatcccaaacatagatcaaatacttagtaatttgtttgacctataatgctggttctcaaccctggctactctttacratcacctgggagcttcttaaaattaccagtgtgatcttaaccccagagattctgatttattgttggtctgggttagggcctaggcatggttaattggatt

SEQ ID NO: 22126 - DNA, 201 bp, Homo sapiens
gggcctcccaaagtactaggattacaggcgtgagccactgcacctcgccccaagttgctttcatttttaattcactcttaatttttcacctttttctagatagctagttcagaattattctagatatatacatcttagtaagtatggtgatttaaaattactttggacaactttaagtttactttttttaaaaaaggaatt

SEQ ID NO: 22127 - DNA, 201 bp, Homo sapiens
actgttgcgttaaggatcgttttcaacatataacattcaaaccatagcagttggcaatataataaaagtagacccaaatatacgactgctaaattcaaagrattattatgttgttttatgtacatttaatgaatagctttaaatttttttatgtttaagtatgtatcatttgaccatcttatcaagaaataataaagcatg

SEQ ID NO: 22128 - DNA, 201 bp, Homo sapiens
cctggctactctttacaatcacctgggagcttcttaaaattaccagtgtgatcttaaccccagagattctgatttattgttggtctgggttagggcctagrcatggttaattggattccttaggtaattctaatgtgtagtcagaattgaaaaccactgccttagaaacacacagttgaactttcttttatcttcatatgg

SEQ ID NO: 22129 - DNA, 201 bp, Homo sapiens
ctgttgcgttaaggatcgttttcaacatataacattcaaaccatagcagttggcaatataataaaagtagacccaaatatacgactgctaaattcaaagarttattatgttgttttatgtacatttaatgaatagctttaaatttttttatgtttaagtatgtatcatttgaccatcttatcaagaaataataaagcatgt

SEQ ID NO: 22130 - DNA, 201 bp, Homo sapiens
ttattcatcacactagttattgcctgaatactttgtttgtttgtttgtttttgtttgtgtgtgtgtgtgtgtctgtgttgtgttttgttttttttttttttttgagacagaatctcactctgttgcctaggctggagtgcagtggtgcaatctcggctcactgtaacctctgcctcctgggttcaagtgattctacttcct

SEQ ID NO: 22131 - DNA, 201 bp, Homo sapiens
attatcctagaacagagataatggaagtaatttttcatggaaaaactatatactttcgtttgtaagctgttagaattggcattttgttggttgggtgccargctgctagactatgcaccacgtgggcagggattttgttttgctcaatgttgtattcctgatgaaaggtaaatgattttaattttgataaagtgatttatt

SEQ ID NO: 22132 - DNA, 201 bp, Homo sapiens
tgcaggtttgttacatatgtatacgtgtgccatgttggtgtgctgcacccattaactcatcatttacattaggtatatctcctaatgctatccctcccccytcccccaaccccacaagagactctggtatgtgatattccccttcctgtgtccaagtgttctcattgttcagttcccacctatgagtaagaacatggggtg

SEQ ID NO: 22133 - DNA, 201 bp, Homo sapiens
tttattcatcacactagttattgcctgaatactttgtttgtttgtttgtttttgtttgtgtgtgtgtgtgtgtctgtgttgtgttttgttttttttttttttttgagacagaatctcactctgttgcctaggctggagtgcagtggtgcaatctcggctcactgtaacctctgcctcctgggttcaagtgattctacttcc

SEQ ID NO: 22134 - DNA, 201 bp, Homo sapiens
agatcttaagaacttatttatttatttatttatttatttatttatttatttatttgagatggagtttcactcttttgcccaggctggagtgaagccgcacratctccgctcactataacctccgcctcccaggttcaagtgattctcctgcttcagctccccgagtagctgggattacaggcatgcatcaccagacccggc

SEQ ID NO: 22135 - DNA, 201 bp, Homo sapiens
atagatgaaaacatatagtcagttgactttctttttttcttttttttttttttttgagacggagtcttgctttgtcacccaggctggagtgcagtggcgcratctcggctcactgcgaaccccgcctcccaggttcacaccattctcctgcctcagcttcccaagtagctgggactaaaggtgcccgccatcacacccggc

SEQ ID NO: 22136 - DNA, 201 bp, Homo sapiens
ttttattcatcacactagttattgcctgaatactttgtttgtttgtttgtttttgtttgtgtgtgtgtgtgtgtctgtgttgtgttttgttttttttttttttttgagacagaatctcactctgttgcctaggctggagtgcagtggtgcaatctcggctcactgtaacctctgcctcctgggttcaagtgattctacttc

SEQ ID NO: 22137 - DNA, 201 bp, Homo sapiens
tgtgaggtactattttattcatcacactagttattgcctgaatactttgtttgtttgtttgtttttgtttgtgtgtgtgtgtgtgtctgtgttgtgttttgttttttttttttttttgagacagaatctcactctgttgcctaggctggagtgcagtggtgcaatctcggctcactgtaacctctgcctcctgggttcaag

SEQ ID NO: 22138 - DNA, 201 bp, Homo sapiens
gcagtgggtggtactggttgttcctttccatgtttaatgcttccttcaggagctcttgtagggcaggtctggtggtgacagaatctctcagcatttgcttktctgtaaaggattttatttctccttcacttatgaagcttagtttggctggatatgaaattctgggtttaaaattcttttctttaagaatgctgaatattg

SEQ ID NO: 22139 - DNA, 201 bp, Homo sapiens
acctgggaggtggaggttgcagtgagctgagattatgccattgcgcttcagcctgggggacagagtgagactccatctcaaataaataaacaaacacacaracaaaccaagcttcagttttttctcctgtaaaattgaaataatgtctattttatggttttatggtaagaaacaaattacatgataaatatggtcagctaa

SEQ ID NO: 22140 - DNA, 201 bp, Homo sapiens
caggtaatgtgatgcctccagatttgttctttttgcttattcttgctttggctatgcaggctctttttttgttccatagaaatttttaggattttttttttctagttctgtgaagaatgatgatagtgttttgataggaattgcattgaatttgtagattgcttttggcagtgtggtcattttcacaatattgattctacc

SEQ ID NO: 22141 - DNA, 201 bp, Homo sapiens
ttattttagaatatatgtttgtaaatatgcgtgtgtgtgtgtgtgtgtgtgtgtgtgtatatgtatatgtccacatatgtttgtatttatatatgtgtatsttaacaaagtctacagttattcaatattcttactctccttgtgaaccatttaggtcatttttgttattctgcttcttgtgtttacaaaattgctcgtatt

SEQ ID NO: 22142 - DNA, 201 bp, Homo sapiens
ctttccaattaccccaacaccttttgttgaatagggtatcctttccccacttcatgtttttgtttgctttgtcaaacatcagttggctgtaaatatttggstttatttctgggttctctattctgttccttttttctacatgcctatttttataccagtaccatgctgttttggtatagccatgtagtataatttgaagtc

SEQ ID NO: 22143 - DNA, 201 bp, Homo sapiens
atttttaaaattgtttattctgttattttagaatatatgtttgtaaatatgcgtgtgtgtgtgtgtgtgtgtgtgtgtgtatatgtatatgtccacatatrtttgtatttatatatgtgtatcttaacaaagtctacagttattcaatattcttactctccttgtgaaccatttaggtcatttttgttattctgcttcttg

SEQ ID NO: 22144 - DNA, 201 bp, Homo sapiens
ccactagcagggagcttagttatttttaaaattgtttattctgttattttagaatatatgtttgtaaatatgcgtgtgtgtgtgtgtgtgtgtgtgtgtgkatatgtatatgtccacatatgtttgtatttatatatgtgtatcttaacaaagtctacagttattcaatattcttactctccttgtgaaccatttaggtca

SEQ ID NO: 22145 - DNA, 201 bp, Homo sapiens
tcgatatgatattggctatgggtttgtcataaatagttcttattattttgagagatgtgccatcagtacctagtttattgagtgtttttatcatgaagagktgttgaattttatcgaaggccttttccacatctattgagataatcatgtggtttttgtcattcgttctacttatgtgatggattatgtttattgatttgc

SEQ ID NO: 22146 - DNA, 201 bp, Homo sapiens
gtttcaaaagggaaacagaataaaagtttggaaaacttgcagcctgacaatgagatagaaaagaaaatcccatttcctgaagtgaaattcaaatcagctgyagaaatttgcacaagtaataagtagctgagtgttaatccccaagacaatgggggaaaatgtctccagggcatatcagaggtcttcagggcagcccctccc

SEQ ID NO: 22147 - DNA, 201 bp, Homo sapiens
tccactagcagggagcttagttatttttaaaattgtttattctgttattttagaatatatgtttgtaaatatgcgtgtgtgtgtgtgtgtgtgtgtgtgtrtatatgtatatgtccacatatgtttgtatttatatatgtgtatcttaacaaagtctacagttattcaatattcttactctccttgtgaaccatttaggtc

SEQ ID NO: 22148 - DNA, 201 bp, Homo sapiens
aagagactcacctaacacataaagactcacataaacttaaagaagcagaaaaaggcatttcatgcaaatggacaccaaaagcgaggagtagctattcttayaaaagacaaaactttaaagcaacagcaattaaaaaaaagacaaagagggacattatataatggtaaaaggctttgtccaacaggaaaatatcacaatcct

SEQ ID NO: 22149 - DNA, 201 bp, Homo sapiens
actgttttgtcttagctttcataatctcaagctatttgtctgtctgtctatctatctatctatctatctatctatctatctatctatctatctatctatcttaggcgaagattttgattaaccctcatacttggctctgatatatcaggttgaggctagaagcagaaggtggtgtcttagtttgttttgtgctgctatggc

SEQ ID NO: 22150 - DNA, 201 bp, Homo sapiens
gatggggttttctaaatatataatcatgtcatctgcaaacagagacaatttgacttcctctcttcctatttgaagaccctttatttctttctcttgcctgwttgtcctggccagaacttccaatactatgttgaataggagtggtgagagagggcatccttgtcttgtgctggttttcaaagggaatgcttccagttttgg

SEQ ID NO: 22151 - DNA, 201 bp, Homo sapiens
cacatcaggaaggggaaaggagttacagagatacaaagatagagacttgcatttatttctggtaaagtaggttaacattacctatttagccatttaaaatkagccatttaaaatatgtaatagtaacttagagctgtgcacaaggtcatggcagatttggaatcagagatgaggtcctgaaagaaccagtgctgggcttag

SEQ ID NO: 22152 - DNA, 201 bp, Homo sapiens
ccaactatctgctgccttcaagagactcacctaacacataaagactcacataaacttaaagaagcagaaaaaggcatttcatgcaaatggacaccaaaagygaggagtagctattcttacaaaagacaaaactttaaagcaacagcaattaaaaaaaagacaaagagggacattatataatggtaaaaggctttgtccaac

SEQ ID NO: 22153 - DNA, 201 bp, Homo sapiens
cactgttttgtcttagctttcataatctcaagctatttgtctgtctgtctatctatctatctatctatctatctatctatctatctatctatctatctatcttaggcgaagattttgattaaccctcatacttggctctgatatatcaggttgaggctagaagcagaaggtggtgtcttagtttgttttgtgctgctatgg

SEQ ID NO: 22154 - DNA, 201 bp, Homo sapiens
ctcttaggttttctgaagcagtttttgtaatactagattggtttgttctttgagtgcttcattcagtttcctctaagaccatttaggacttttttttttttgcattatgagttttaaatttttcattcaacctctttgaagactatagcactctactttaaaaccattttttggagtcaattttggtaaggttatattttc

SEQ ID NO: 22155 - DNA, 201 bp, Homo sapiens
aaattgaagaggacacaaacaaaacaaagagcccatgctcatggattaggagaattaacgttgttaaaatgaccacactccccagagcagtctactgattsagtacaatccctgtctaaatatcaatgtcatttttcacagaaatagaaaaaagatcctaaaatgtgtaagaaaccaagtacggctcaaataccaaagtga

SEQ ID NO: 22156 - DNA, 201 bp, Homo sapiens
tcactgttttgtcttagctttcataatctcaagctatttgtctgtctgtctatctatctatctatctatctatctatctatctatctatctatctatctatcttaggcgaagattttgattaaccctcatacttggctctgatatatcaggttgaggctagaagcagaaggtggtgtcttagtttgttttgtgctgctatg

SEQ ID NO: 22157 - DNA, 201 bp, Homo sapiens
gccaagatcgcaccactgcactccagcctgggtgacagagcaagactgtctctcaataaataaataaataaataaataaataaataaataaataaataaataaaagtttgccaactgctgatttagaaaattgtgatcatttctttaggtgaatattcctgacaaactggtttaaaatcatgtttaaatatctgcaaattt

SEQ ID NO: 22158 - DNA, 201 bp, Homo sapiens
atcactgttttgtcttagctttcataatctcaagctatttgtctgtctgtctatctatctatctatctatctatctatctatctatctatctatctatctatcttaggcgaagattttgattaaccctcatacttggctctgatatatcaggttgaggctagaagcagaaggtggtgtcttagtttgttttgtgctgctat

SEQ ID NO: 22159 - DNA, 201 bp, Homo sapiens
tcaagtaatgttaaagttgtttaaacagtgtactaataaaacctttcactaagtatggggagactgtgtagggggtgtgtgtgtgtgtgtgtgtgtgtgtktttgtgtatatattttttccctccaaaagtgatctaacaacttaaataattaagaattctaaacatactggtgggaaatgttaccaaatggtaaaacatt

SEQ ID NO: 22160 - DNA, 201 bp, Homo sapiens
catgtaataaatttcctttccagatgggctgctatatctggttgggtggaataatattctctgaagatgaaataaggtataatcttgtaaagtgcatgaayactctgtttctggatcccaaagtggattattatccttaactcaaggcatttgggtcattaaaaagtcacatcctaggctctttgtgtggtttaagttttt

SEQ ID NO: 22161 - DNA, 201 bp, Homo sapiens
gcagtctgcaccttggataattctagtacacagcagagcatccagattatcactgttttgtcttagctttcataatctcaagctatttgtctgtctgtctrtctatctatctatctatctatctatctatctatctatctatctatctatcttaggcgaagattttgattaaccctcatacttggctctgatatatcaggt

SEQ ID NO: 22162 - DNA, 201 bp, Homo sapiens
aagaaccttttaaggtactttgccttcaagtaatgttaaagttgtttaaacagtgtactaataaaacctttcactaagtatggggagactgtgtagggggtgtgtgtgtgtgtgtgtgtgtgtgtgtttgtgtatatattttttccctccaaaagtgatctaacaacttaaataattaagaattctaaacatactggtggg

SEQ ID NO: 22163 - DNA, 201 bp, Homo sapiens
ctccctttttgggggctccgagtcatagttagggcattcatggatatatgaagtttttttgttcaggatggttttcagggaatagttctgttgagatccarctttttgtctttgcggaggcttcctttataacagttttgtcagtgcttcttaaactttaatatgcatatgaatcacttgggagatcttgttagcatcaag

SEQ ID NO: 22164 - DNA, 201 bp, Homo sapiens
attatgtcacccaggcttgagtgcaatggcatgattttagctcactgcaacctctgcctcccaggttcaagcaattctgccacagcctcccgaggtgcacrccaccacgcccagttaattgttgtatttttagtagagatggggtttcgccatgttggccagactggtttcaagcccctgacctcaagtgatcggccctcc

SEQ ID NO: 22165 - DNA, 201 bp, Homo sapiens
gtaatgaataacacaattactctttcttgctgcttccattgttaaatatgcaagtggattcacttggaaaatttgagagctgctttctactggtcatggtrgtggccatagtgtttaggttattctccaattaagattttttttgctgcagagggtggtaataccttattagatccaattaaagtatttattgaaggctta

SEQ ID NO: 22166 - DNA, 201 bp, Homo sapiens
cagatattggtactttaaatctacacaagacaatgtattaacgttaagtatgctacaaataattggtgaaatgaatgatgttgaagatacaggggttagcyttagaaatattttatgtaactagactttgggtcaggcgaggcttgcagattaacagcttttggagtaataacctaactagtactccatttgatcctgttt

SEQ ID NO: 22167 - DNA, 201 bp, Homo sapiens
attgaatctataaattactttgggcagtatggccattttcacaatgttgattcttcctatccatgagtatggaatgtttttccatttgtttgtgtcctctyttatttccttgagcagtggtttgtagttctccttgaagaggtccttcacattcctttaagttgtattcgtaggtagtttattctctttgtagcaattgtg

SEQ ID NO: 22168 - DNA, 201 bp, Homo sapiens
ggaagccatttcttaactgtagacttaattttaagactttgaaaaccatcaagtttctgtttaaacagaaagaattcctttctgtttaatagtactctcarctgaactctattctttttacattttactacaagcagcaagaagaaatcaggctgcaccttcaccactgtgtttagaagtctacttagccagatcaccctg

SEQ ID NO: 22169 - DNA, 201 bp, Homo sapiens
ctcaccaggatcacttggagaaaaatctcttagtattctgagagggcctagactcccactgagtcctccaaaaggactgaagatagaggtttcctagagcktctggctcctctctttctttttagtgctggttctctctaatcttctttgtaaactcccattctctgaaagacaaatgcttttagggactctgcatggcat

SEQ ID NO: 22170 - DNA, 201 bp, Homo sapiens
ccagcagagcaaggaacccgaggactccacatctaatcaacagactcccgacagcattgacaaagatggtcctgaagaaccttgtgctgaaagtaaggcartgccaaagtccgaaatcccttcaccacaaagccaactgttagaagatgctgaagctaatttggttggaagggaggcagcaaagcaacagaggaaagaact

SEQ ID NO: 22171 - DNA, 201 bp, Homo sapiens
aatcttctgtacctctaatttcttacatagtaagtggaagttcaacaactggaagatctctgtggtctttagcgtcctcaccctctctctatgctttctcrttcagcaaacatttgtcaagtgtctactctgtggcagaatttgtgtaagaacttggggatagtctgtcttcagatgagctcagagtctagtaggagagag

SEQ ID NO: 22172 - DNA, 201 bp, Homo sapiens
attacccatggccagatttcctagttattttctcattgcaaaagaatgtgaaacaaactgattaagtgtaaaataactcttaactcttatttagactatcrtagtcatcttcaaaactctttgagatcatcttgagaattcacagttttctattctttttgttgctagcaggtgaaattatgtacctttggaaccctctgt

SEQ ID NO: 22173 - DNA, 201 bp, Homo sapiens
ttaaaattagccatttaaaatatgtaatagtaacttagagctgtgcacaaggtcatggcagatttggaatcagagatgaggtcctgaaagaaccagtgctrggcttagctgtcagttttgcaggttaagctagactgttagcgtatccgtacaaaatagttatgaagattaatgttgccttctgtagaatgattttgcctg

SEQ ID NO: 22174 - DNA, 201 bp, Homo sapiens
ttaaaaaatatttgtttatgtctaatccatcctcacattaactcatggtatgtttctgggtagtttgttgtctccaaattttataaaccacaaaaatgtgytgctgctgagatgtcagtaattaattatttttataaataatcttttgtcaactctggtgccttagctgttcttaggtttttaaagaatatcctgataaag

SEQ ID NO: 22175 - DNA, 201 bp, Homo sapiens
tcgtgaattaagcacaaatcgtagaacagatttgtattggtacagccaatgtatttgagtggagcccaagtattgatatgtcagagggtggtcattttgcyttatttttttaatcaatattgttgactattttataaatatttcaatgcctactatgtgcctaaaagtattctatgagaaatgtattgaatctactttttg

SEQ ID NO: 22176 - DNA, 201 bp, Homo sapiens
aaaaaaaagaaaaaaaaaaccctgaagctttgactcccaacctcatcatgagtaagcttaatctggcagagtatttaagctagatgagtctggaattagcwagaagactttttgttttttgttttcctttaaagcaaatctctaatactactaccacattgctaccaaaggcattactacttagagctagaggaaaagtag

SEQ ID NO: 22177 - DNA, 201 bp, Homo sapiens
ctcctggccatttcatgtaaatggaatacagtatgtggtcttttgtgactggcttttttttttttaactagagaaacgttttcaaggttcattcatgttgyagcatttatcagtacttaattcatttttattgcaaaataatattccattgacttgataataccacatttagtttattcattttgatattagttgatggat

SEQ ID NO: 22178 - DNA, 201 bp, Homo sapiens
aattttgatgaagttcaattcatctagttttttttgtcacttatactttgatctcatatcctagaagactttacatattctgagatcataaagatttactygttcatcttcctctaagagttttgtagtttttagtctttcttatatttaggtctatgatccattttagttaattttgtataaggtgtgaggaagggatat

SEQ ID NO: 22179 - DNA, 201 bp, Homo sapiens
tgagctactgattgtagggggaaataatgatgctatttacttttgtgattttcttcaaactgaacaatcaagttaaaacctaagataatgtttcaaaagtmatcactatatatgtggtcttatccttttatccttattttctctgtaagtgattccttttctgctcttctgatttcttaatatttttcactttcttcagtt

SEQ ID NO: 22180 - DNA, 201 bp, Homo sapiens
gaaggtacacaaaataaatttttagggcatgaaaagttgaaaggaatagctaatatattgagtagagaaataggaatttaacattatcacagtggactgaygtgctatgtcatggcaaataatatgttatttaatgtgaataaatatatatgtctgcattaatgatatataaaatattcacttaatttcgaggaaacagtg

SEQ ID NO: 22181 - DNA, 201 bp, Homo sapiens
agtacctagtttattgagtgtttttatcatgaagaggtgttgaattttatcgaaggccttttccacatctattgagataatcatgtggtttttgtcattcrttctacttatgtgatggattatgtttattgatttgcatatgttgaaccagccttgcatcccagggatgaagccaacttgatcatgatggataactttttt

SEQ ID NO: 22182 - DNA, 201 bp, Homo sapiens
gaatgcatgagaagtctagagaaggacttctcaattctagggaacctgatctggagaaaagatttctgacaatgagcataaaattattccaccttcttatraaaggcaggactaggatcactgagtatatagaaattttagggaagtagattacattaatatgtaatgatgtgaaaagttggaatcactcaatatggattg

SEQ ID NO: 22183 - DNA, 201 bp, Homo sapiens
agtttagtcaatttttaattactgtatattcttcccatccatttacacagttcagtggtttccttccttcattcatattccttaaatagtttttgttccayggactatcattttttattatatagtttctctgtccctgctgattgcattagtctagtactagcaaacagagggttatccaaatgtttaagaactaaacca

SEQ ID NO: 22184 - DNA, 201 bp, Homo sapiens
ttcccttctagtagttataaaatgttttatgaaattatttggatacacaaatagagaaacaaagaatttaaaaaatgcaactctcattccttgtcatgtctcatatgaaggacaagaaatccctttaatcttaacagaggtctttaaagttcagattataaaattacattcccaattattaatgcatgcatggggattatc

SEQ ID NO: 22185 - DNA, 201 bp, Homo sapiens
tgtccttggttcttccatcttccctttatcatccttcccatgtgtccccatgaacttggtaaaaacccaagggaatacaggttgcaaacccaagagagggytgaggtttatgaggtgctgtggtctccacaggttcacattgctagtctgaaaactccacatttctgtccttctgtcagactcactcacttctgataagaa

SEQ ID NO: 22186 - DNA, 201 bp, Homo sapiens
atcagcatacagaaaataagtgctgtttctatacaaaaataatgaactagctgagaaagaacacaagaagacaaccaaatttacaatagttaaaaaaaaaatacctaggaataagtttaaccaaggagatgaaagaccttcacaaggaaaactacaaacactgatgaaaaaaattgaagaggacacaaacaaaacaaagag

SEQ ID NO: 22187 - DNA, 201 bp, Homo sapiens
aaatgttgtttggccagttgtttatacatttgaaaaaaaataaaattagattgccaacacatattataattttagaaaatttccaggtggataactgcctraatacagaaaatcagaatgttaatgcattttgaagaaaacataggcccaaggcagtggctcacagctgtgatcctagcactttgggatgccaaggcagga

SEQ ID NO: 22188 - DNA, 201 bp, Homo sapiens
cttagcaaggaaacagttccttgacgctcaaatcataaaggaagagctgcaaagagggcaataaaaagtgttttcttctcttggtccctgagcaattaaaytggtaacctaatctgatgttagggagtatagaccataaactgtgtttaattagtttgcacccagtgtcatttcacacagtagacactttaatttacaact

SEQ ID NO: 22189 - DNA, 201 bp, Homo sapiens
aattttctatagtttaacctgcaaataaatgtaattacaatgacaattttacctgaatagtaaaactttgcttttagttttaaatattttcacctttattwtaattagttcatgaaaatagaatttaaaattacaaatcatagtattttagaaagatacaaaaacaagcacttgtcttcatatctttctaaaatactatgg

SEQ ID NO: 22190 - DNA, 201 bp, Homo sapiens
agaataagaacaagacaaggatgcctactttcgtccacttcattcagcattgtaatggaggtcccagccattgtaataaggtatgtgttatggattgaatygtgtacctcaagaagttatgttgaagtcctaacctctggtacctttcaatgtattcttatctggaaatagggtctttgcaatgtaatcaagttaaaatga

SEQ ID NO: 22191 - DNA, 201 bp, Homo sapiens
cacaggaaagacctgtccccataattcaatcacttcccaccaggttcctcccatgacatgtgggaattgtgggcgtaacaattgaagatgagatttgggtrgggacacagccaaaccatatcaatacctcaacataataaaggccacatatgacaaactcacagctaacattgtattgagtggggaaaagctgaaagcctt

SEQ ID NO: 22192 - DNA, 201 bp, Homo sapiens
aatagggtctttgcaatgtaatcaagttaaaatgaggccatgctgatttagggtgggtcctaatccaatatgactggtgtccttattagaagagaagagaygcagtgggaagacagccatatgaagatggagacagatactggaattatattccctcaagccaaggaacttctaggacaaccagaagctagaagagggaag

SEQ ID NO: 22193 - DNA, 201 bp, Homo sapiens
cccaaaacatgcttaaccaggaggctgattcatctgctgactccaagaacatgaagatgaacatgatagacagactgtccaccatctgaatgttcattcamcacccattcattcagtaacccttactcaggcccagatgagcagcacatttcttgccaacaatcattaaatgtccaagaaggctctcgttatcatcttctg

SEQ ID NO: 22194 - DNA, 201 bp, Homo sapiens
aaagaaccttttaaggtactttgccttcaagtaatgttaaagttgtttaaacagtgtactaataaaacctttcactaagtatggggagactgtgtagggggtgtgtgtgtgtgtgtgtgtgtgtgtgtttgtgtatatattttttccctccaaaagtgatctaacaacttaaataattaagaattctaaacatactggtgg

SEQ ID NO: 22195 - DNA, 201 bp, Homo sapiens
tggataggaacttgataataatgcctatcatgcacaagcaatttaggtgactaggaaatatcattctctacagccacacccttttttttttttttttttttctttgaggcagagacagtctcactctgtcctccaggctggagtgcagtggcactatctcagctcactgcaaccttcacctcctgggttcaaaccgattct

SEQ ID NO: 22196 - DNA, 201 bp, Homo sapiens
gcctgattgccctggccagaacttccaacactatgttgaataggagtggtgagagagggcatccctgtcttgtgccagttttcaaagggaaggcttccagwtttgggccattcagtatgatattggctgtgggtttgtcataaatagctcttattattttgagatatgtcccaacaatacctaattcattgagagttttta

SEQ ID NO: 22197 - DNA, 201 bp, Homo sapiens
aaaaagtcaggaatgaattaactttgtctataaataagcacacacagatatagattttctctgacaatttaggcatacacacatctctgcatatatatatwcacatatttagtgtcatatatatgtatatatatgacatatatatacacagcatatttagcgtcctatcatcatgtaggaagatttcagtgctgtaattat

SEQ ID NO: 22198 - DNA, 201 bp, Homo sapiens
gatatgaacagacacttttcaaaacaagaaatttatgtggccaacaaacatatgaaaaaaagcttatcatcactggtcattggagaaatgtgaatcaaaaygacaatgagataccatctcataccagttagaatgacaatcattaaaaagtcaggaaacaacagatgctggagaggatatggagaaataggaatgctttta

SEQ ID NO: 22199 - DNA, 201 bp, Homo sapiens
caataataagtatgatacatctttttcatatgcctctcttcatttacaaagatggtgctgggcattccaatctacctgaagcattttttttttttttttttggtcaggagaggtaacagggtttgaacccatcttcattccactatgcattctcccgtgtgactgctgtcacatacctgagagacagatggttgggagtgc

SEQ ID NO: 22200 - DNA, 201 bp, Homo sapiens
cccagtgccatgatagccttgaaaccaacagcctgaaatcacggtgaaaaccaccaccttggcagccacttcagggggcttatagtattggattgccttaraaatcccattttcattgaattgtcattgtttgacctgtgtggtgattgtctggataaccccactcacaaagattatttttatttgacctgactcagtgct

SEQ ID NO: 22201 - DNA, 201 bp, Homo sapiens
cttccgtctcccgagttcaagcgattctcccacctcagcctcctgagtagctggaattacaggcacgcaccaccatgcctggcttaatttttctttttttmgtagagacggggtttcaccatgttggccaggctggtctcaaactcctgacctcaggtgatctacccacctcggcctcccaaagtgctgggattacaggag

SEQ ID NO: 22202 - DNA, 201 bp, Homo sapiens
agttttagggtacatgtgcacaacgtgcaggttagttacatatgtatacatgtgccatgctggtgtgctgtacccattaactcatcatttagcattaggtrtatctcctaaagctatccctcccccctccccccaccccacatcagtccccagagtgtgatgttccccttcctgtgtccatgtgttctcactgttcaattc

SEQ ID NO: 22203 - DNA, 201 bp, Homo sapiens
aagggctgggcccgaaatctatgattttcatatctgtattatatacagtttcttgcttagcgtctagaattacctattatttaggatagattcctaaaaawatataattttattaatttataatattatttataattttattaaattatatttaaattaattaaaaataaaattattttaaagccctttatatataattca

SEQ ID NO: 22204 - DNA, 201 bp, Homo sapiens
ttcatttcctgccacagagggagatactcttacaaatggagcttttcttcatagatctaagtttcccttacaaaacagtatcttctactctgttttttttytttttaattatacttttaagttttagggtacatgtgcacaacgtgcaggttagttacatatgtatacatgtgccatgctggtgtgctgtacccattaact

SEQ ID NO: 22205 - DNA, 201 bp, Homo sapiens
ctcactgcagccttgaactcctgcgcacaagggatcttcctgccccagcctcccaagtagctgggactacaggtgtgtgccacagtgcctggataattacwttttttttttttttttttgtagattcagggtcttgctatattgtctaggctggtcttgaactcctgggctcaagtgaccctcttgcctcaccctcccaaa

SEQ ID NO: 22206 - DNA, 201 bp, Homo sapiens
tattaggattttgtacttgtgaagtaaatatataggatgaagtcctagaagtataattcctgtgtcaaagactacattgcttttttttgtttttttttttkttgttgttttttttgagacggagtttctctcttgttgcccaggctggagtgcaatggcgcgatcttggctcaccccaacctctgcctcccaggttcaagt

SEQ ID NO: 22207 - DNA, 201 bp, Homo sapiens
ttctcttttctctctaaatgttgggtcattattaagtttatgtctctatatcagggattgtgtgttcaggtttggttacaaaatggttagtgctcctgtawtttttttagccagcattgattaacagagttaatcactttctgtctttaaaagagactgataagggcttatgatataaagtttatttgggaaattatctgt

SEQ ID NO: 22208 - DNA, 201 bp, Homo sapiens
ccctgacctctggggctcaagtaattctcctgcctcagcctcccatgcagctaggactacaggcaagcgccaccatgcctgttattattttttttttttttgtagagatgaagtctcactatgttgtctaggcttgtcttgaactcctgggttcaagcgaccctcctgccttggcctcccgaagtgctgagattaaaggca

SEQ ID NO: 22209 - DNA, 201 bp, Homo sapiens
atattacatattatatattatgtaatataatatataatatattatatgtatatttattacatataatataatatataatattatattaaatatatatattwaatatatatatttatatattatatttataattattatatataataattattatatatataataattattatatataataatataagttatataatataat

SEQ ID NO: 22210 - DNA, 201 bp, Homo sapiens
gatgatttcttaaagatcgatgaactgctggtttctttttaaagggcattcacaaaagcgaccaaaacttgggctaaagtattgctttcaaatatacttakgtgtagcttgtatttgtgagtgtgtgtatgtgtttgtgtgtgtgtgagattttgataggtatctccaaattgtgtttggaactttttttttttttttttt

SEQ ID NO: 22211 - DNA, 201 bp, Homo sapiens
atgtggagactcacattgtgaacttttgccccaagaactaccacaggaaaataccaggaaagccaagagaatccacagaccttttgaaggaactggatcascgctgcaggctccctaaaatgccaaaaaagtgtgagtctgcttgctttctcaacagggaagctcgtgatttagggtgagttctcagccctggtcataagc

SEQ ID NO: 22212 - DNA, 201 bp, Homo sapiens
gggagggaatggggggtgtgtgtaggggagaggggagggtgtttgtggctttaaaaagaatggtcagggtaaaaggagattgtcgatgctttacaaaaaamgaaaaaaacaggcaccacactccaaagcctttcttgtttgtctgcatgggccatgcatgcgtgctgggccaggagccgagtttggagacggtttaagtga

SEQ ID NO: 22213 - DNA, 201 bp, Homo sapiens
tattaatctttacatttccttttcctcctttttgtacattaactgctgaattcagagtttgagtcattatgtggatttttggttgttaaggagagcatccrgcctgttaatgctctcaaatggggtatccctcagaaacctctccttgcaaaagtagcttatggatattatcttttacctgggtagaggggtttcagctgc

SEQ ID NO: 22214 - DNA, 201 bp, Homo sapiens
gtatcattaagattaggtagtatttcttttcttttgtataattatcagtgttgagtatcattaagattaggtagtatttcttttcttttttttttttttttgagacagagtctcgctctgccgcccaggctggagtgcaatggcacaatctcggttccctgcaacctctgactcctgggttcaagcaattctcctgcctca

SEQ ID NO: 22215 - DNA, 201 bp, Homo sapiens
ttgaactatattctccaggtaatatggagaaacttaggaggactttttatgcccttctccatctccattagaaagtaatacttgctcattatacagaattyggaaagtacaaaaaagtatacaaaagaaatgtaaaatcattcgtaaattcattctctctcctctgtcactctactccatcccgtcttccagtgctgtttc

SEQ ID NO: 22216 - DNA, 201 bp, Homo sapiens
gctggaggtctactccagacccagtttacctgggtatcaccagtggaggctgcagatcagcaaagattgctgcctgttccttgctctggaagctttgtccyagaggggcaccctccagatgccagccggagctctcctgtgtgaggtgtctattggtccctgctgtgaggtgtttcccagtcaggagacacaggtgtcagc

SEQ ID NO: 22217 - DNA, 201 bp, Homo sapiens
ctcctaatgctatccctcccccaaccccccaccccactacaggcctcagtgtgtgatgttccccgccctgtgcccaagagttctcatcgttcaattcccayctatgagcaagaacatgcagtgtttggttttccatccttgctatagtttgctcagaatgatggtttccagcttcatccatgtccctacaaaggacatgaa

SEQ ID NO: 22218 - DNA, 201 bp, Homo sapiens
tcttctccttcctctgctttataagaaaacaagactggttaataaaaaaaacaaaacttataaataaatgacacatttgccttaaaagggaaacttgaacyttaatgaggggtggtttattttttcagataacttgggtgtcttttggttgtattgaatgttttgtgcttttcaaaatcatatcatgaataataatattag

SEQ ID NO: 22219 - DNA, 201 bp, Homo sapiens
cctgactcttttaaatgttctcttctccttcctctgctttataagaaaacaagactggttaataaaaaaaacaaaacttataaataaatgacacatttgcyttaaaagggaaacttgaaccttaatgaggggtggtttattttttcagataacttgggtgtcttttggttgtattgaatgttttgtgcttttcaaaatcat

SEQ ID NO: 22220 - DNA, 201 bp, Homo sapiens
ttataaaatgttaacagtatgaatttgattctcctaaatatttcatattttaaatctcctcagaagtatattatcccaagcaattttctcaattatttgargctgcgtgaagaatttgagcaagatgttcatcagatttttgttagttcatttaagatatatcaaactttatttattgataacaggcatgtaaaaattaat

SEQ ID NO: 22221 - DNA, 201 bp, Homo sapiens
ggtggaaggcaaggaggagcaagtcacatcttacatcttacatggatgacagcaggcaaagagagagtgcttatgtagggaaactcccatttttaaaaccrtcttatctcgtgagacccattcactatcacaagaacagcacaggaaagacctgtccccataattcaatcacttcccaccaggttcctcccatgacatgtg

SEQ ID NO: 22222 - DNA, 201 bp, Homo sapiens
gaggagaactggaggaggatgaatgttgaaaaattatctgttgggcacaatgttcattgttaaggtgatgagtatgctagaagctcaaaccccactactaygcaatatatccatgtaacaaatctgcatatataccctctaaatgaatgaaaaaaaatttttaatgcaatataacaatttaaaaatttttttagggcacaa

SEQ ID NO: 22223 - DNA, 201 bp, Homo sapiens
tgtctctgattcaggtgtcttgggtcttctgctggcatgagggaagccattgcgggctaacttgtagcttgcaagtagggtaaaatctcagacccttcatrgttcttgacattaccaaggtaattaaaagggaaaaggaaaatcttttcagaaatggcaccatattaactggatatccatctggaaaacaattaacattaa

SEQ ID NO: 22224 - DNA, 201 bp, Homo sapiens
taaaacttaaaaccatactacttagaaaaaataggctgggcgtggtggctcacgcctgtaatcctagcactttgggaggccaaggcaggcagatcacttgrggttaggagttcgagaccagcctggctaacatggtgaaactccatctctactgaaagtacaaaaattagttgggtgtggtggcaggcgcctgtaatccca

SEQ ID NO: 22225 - DNA, 201 bp, Homo sapiens
catagaaaagagctacatttttgttgttatttatttatttatttgtattatactttaagttctagggtacatgtgcagcacgtgcaggtttgttacataggtatacatgtgccatggtggtttgctgcacccatcaacccgtcatctacattaggtatttctcctactgctatccctcccctagccaccagcccccatcct

SEQ ID NO: 22226 - DNA, 201 bp, Homo sapiens
tttattagagttggagtttcaccgtgttagccaggagggtgttaatctcctgaccctgtgatctgcccgccttggcctcccaaagtgttgggattacaggmgtgagccaccatgcccggccttctctagttcttttaattgtgatgttagggtgtcgattttagatctttcctgctttctcttgtgggcatttagtgctat

SEQ ID NO: 22227 - DNA, 201 bp, Homo sapiens
tttaagaatgttgaatattggcccccactctcttctggcttgtagggtttctgcagagagattcactgttagcctgatgggcttgcctttgtgggtaaccygacatttctctctggctgcccttaacattttttcctttatttcaaccttggtgaatctgacgattatgtgtcttgcagttgctcttcttgaggagtaact

SEQ ID NO: 22228 - DNA, 201 bp, Homo sapiens
tgacagcacaatcactggttattttgtaaagaaatttattttaaaacagtatgacggccaaaaaaaagctattggaaggagaggaagagaggacacacctrggttacatttggcctcttttaagtctgtgagacatgtttaaaaatctttaaagaaagcttactttgtcactatcccatttctgctataatcaacataatt

SEQ ID NO: 22229 - DNA, 201 bp, Homo sapiens
acaccacctgttccccaaaaacctattataacaacaacaaaaaaattttaactgccacaaagattatatttgcttcaatataaattaggaagtttttccgyatttttttattttcagaaattacttttataaaagagacttaatgatgtagataagatagaaagtaccgttcctggaagtttgttattattcagcttttaa

SEQ ID NO: 22230 - DNA, 201 bp, Homo sapiens
catagatttggtcttttcacatagtcccatatttcttggaggctttattcattccttttcattcctttttctctaatattgtcttcatgctttatttcatyaagttgatcttcaatctcttgataccctttcttcagtttgatcaatttggctattgatacttgtgtataattcacgaagttcttgggctttgcttttcag

SEQ ID NO: 22231 - DNA, 201 bp, Homo sapiens
caacatataaaagagataatatatcatagctaggttgggtttagccaggaatgcaagtatggtttaacattggaaaatctgtcactttttatatttgacaytgtactggaaggcaagtaaaagaaattaaagaaataaattgtaaagaaatgaaactgttattcacatatgatgagattgtctatttaaaaaatctcaaaa

SEQ ID NO: 22232 - DNA, 201 bp, Homo sapiens
ctatgtggcataggcaccaaggattcaggactggaacagcatactgggcctgccctttcctcctggggtttcgctctttagttgtggagttgtggggaatwtagggcaggtggcttattcagggattctgggagaggagactgggaacctcgtgtgggaaaggggtagttgggccctctattaaacagcagctgatggcca

SEQ ID NO: 22233 - DNA, 201 bp, Homo sapiens
ttaaattatttcaactagactggtccaagtcatctgtagtcagtcagtcagtcactcagctagtaaatgcctgaggcaaaacctcggatttctgtttcctrttatttctactgtaccctatctgtattcagaagtgatggtctattttataatctgtctgcttcaaatcactttggcaaccattatgatatatagcctttt

SEQ ID NO: 22234 - DNA, 201 bp, Homo sapiens
tgtaatataatacagatgctggtctatttctaatgtctttgaaatgtacattgatataatgggacaacatgctttattataaacacgtttaaacattcatrtgtttcatattggtgtgtcaaaagatccatcaacaatttaattgtagtattttatactccataaactagtacatattcaggtaaaacaaatattcttcat

SEQ ID NO: 22235 - DNA, 201 bp, Homo sapiens
atagtcccatatttcttggaggctttattcattccttttcattcctttttctctaatattgtcttcatgctttatttcattaagttgatcttcaatctcttgataccctttcttcagtttgatcaatttggctattgatacttgtgtataattcacgaagttcttgggctttgcttttcagctccatcagatcatttatgt

SEQ ID NO: 22236 - DNA, 201 bp, Homo sapiens
tgcagtttcttcctagtgtcaataggctttgtaatttggtatgtttttgcagtggctcgtatcgattattcctttccaagtttagtgcttccttcaggagmtcttgtaaggcaggcctggttgtgagaaaatctctcagcctttgcttgtctgtgaaggattttatttctcctttgcgtatgaagcttagtttggctgggt

SEQ ID NO: 22237 - DNA, 201 bp, Homo sapiens
attaaggtgtaaatttctcacacatcgtgttttgtcctttgtttcttttttgagactacaacctctgcctcccaggttcaggtgattctcatgcctcagcytcccgaatagctggaattacagccagctaattttcacatttttagtagacacagggtttcaccacgttggtccagctggtctcgaactcctgacttcaat

SEQ ID NO: 22238 - DNA, 201 bp, Homo sapiens
ttaaagtctgttttctcttagagtgggatcgcaacctctgctttttttttgttttccatttgcttggtaaatatttcttcatccctttattttgagcctaygtgtatcttagcacatgagataggtctcctgaatacagcacaccgataggttttgagcctttatccaatttgccagtctgtgtcttttaattggggcatt

SEQ ID NO: 22239 - DNA, 201 bp, Homo sapiens
ggtgctcagaatgtatattctgttgatttggggtggagatttctgtagatgtctgttaggtcacttggaccagagctcagttcaagtcctgaatatccttsttaattttctgcctccttgaggtgtctgatatacacagtggggtgttaaaatctcccactattattgtgtgggagtctaaatctctttgtaggtctctaa

SEQ ID NO: 22240 - DNA, 201 bp, Homo sapiens
ggattcattgatttttttgaatggtttttcatgtctctatctccttcagttctgctctcatattaggtatttctcgtcttctgctagcttttgaattatttatttgcccgttgcttttctagttcttttttttgtttgtttgagatggagtcttgctctgttgcccaggctggagtgcagtggcgcgatcttggctcactg

SEQ ID NO: 22241 - DNA, 201 bp, Homo sapiens
tggattcattgatttttttgaatggtttttcatgtctctatctccttcagttctgctctcatattaggtatttctcgtcttctgctagcttttgaattatttatttgcccgttgcttttctagttcttttttttgtttgtttgagatggagtcttgctctgttgcccaggctggagtgcagtggcgcgatcttggctcact

SEQ ID NO: 22242 - DNA, 201 bp, Homo sapiens
cctggattcattgatttttttgaatggtttttcatgtctctatctccttcagttctgctctcatattaggtatttctcgtcttctgctagcttttgaattatttatttgcccgttgcttttctagttcttttttttgtttgtttgagatggagtcttgctctgttgcccaggctggagtgcagtggcgcgatcttggctca

SEQ ID NO: 22243 - DNA, 201 bp, Homo sapiens
gatgagcattttttcatgtttgttggccgcataaatgtcttcttttgaaaagtgttcatattctttgctcactttttgatggggttggtttttttttttttcttgtaaatttatttaagttctttctagattctggatattagccctttgtcagatggatagattgcaaaaattttctcccattctgtaggttgcctgttc

SEQ ID NO: 22244 - DNA, 201 bp, Homo sapiens
tttaatgatcgccattctaactggtgtgagatggtgtctcattgtggttttgatttgcatttctctaatgaccagtgatgatgagcattttttcatgtttkttggccgcataaatgtcttcttttgaaaagtgttcatattctttgctcactttttgatggggttggtttttttttttttcttgtaaatttatttaagttc

SEQ ID NO: 22245 - DNA, 201 bp, Homo sapiens
aacatgaactcatccttttcaaataacatgaactcagccatagctgcatagtattccgtggtgtatatgtgtcacattttctttatccagtctgtcattgmtgggcatttgggttggttccaagtctttgctattgtgaacagtgctgcagtaaacatacgtgtgcatgtgtctttacagtagaatgatttataatccttt

SEQ ID NO: 22246 - DNA, 201 bp, Homo sapiens
ttttgaatagaaatcaaccagatgagctagcattaaagtttggattcagaattttcatttatcaattgcagaaatataggtaattataagataactgcatmctgaagtaatttatatccagatataaatgtacgtgatcagtttgatcagttttccttttcacaaataaagtgttaaacatcaaagtggtttttagtataa

SEQ ID NO: 22247 - DNA, 201 bp, Homo sapiens
ctttgaatgatgtgcaaagagctatggcgctggacgcggtggctcatgcctattaccccagcacttcaggaggccaaggcaggcaaattgcttgagcccargagtttgagaccaggctgggcaacgtagggagactccatctctacaaaaaatacagaaactagtcagatgtggtggtgcacacccgtggtctcagctact

SEQ ID NO: 22248 - DNA, 201 bp, Homo sapiens
tattgtttctgtttgaaatttggggaaactgagtcccagaatttcctggttttaggtcttatttcacttgtcatgctggtggatgtcaaagatgcagtttwtcaccattcctgtgtagctagccaaaggtatccatccgtgcttctcttggttgcataaaattatggtgagagttagtagatggtgcaggttcatggacga

SEQ ID NO: 22249 - DNA, 201 bp, Homo sapiens
attaaaaaaatattctaagcaatacaatagcatttattctaaatatatttaaaattaaggtgtaaatttctcacacatcgtgttttgtcctttgtttcttktttgagactacaacctctgcctcccaggttcaggtgattctcatgcctcagcctcccgaatagctggaattacagccagctaattttcacatttttagta

SEQ ID NO: 22250 - DNA, 201 bp, Homo sapiens
aattatttgtacatttgtatcaattattcagaattatggaatattctagtttgagaagtaagagatacttgattttatagtgttaatagcaagaaaaaatrctttactttcttgcctatatttttgtttaatctttttaacaaccttaagagtagagcattatgatttctgttctatagcagatgagacctaaatgcaggg

SEQ ID NO: 22251 - DNA, 201 bp, Homo sapiens
aaatatttttcctatagtaaagagaacatataatgcatgaatgtagtactcattaatgctatatatttgttaaaatagaaaaatgttttatatttaaataytccacattgtacatagagcccaattttttagcataggaaaaaatgtgaaattttagcttatatttatatatcttttctccttctgtcagtgactgccacc

SEQ ID NO: 22252 - DNA, 201 bp, Homo sapiens
agatatgagttctaggctgttcttgctggaatgactttagggagtacagaaatgatccacccaagagccagttatagctaatatggttgctgcaactgtgwgttatgaatatactcctcttgctgcaatccagtaatcaggaagccagagttacactgctaatgctgtagtcacaattgcctcttgacacccagaaaattg

SEQ ID NO: 22253 - DNA, 201 bp, Homo sapiens
ttttttgttttatccctctggcttttttcaattggtagtatgacagttgacaggcatgtaagaccattccatgtccatgtattagcatttttaatagctcygtagtataaatgtgccctaacttattattcatcctttctttattgatggatattagattatttccgatgtttttgcttctatgaataatgctgcatcttg

SEQ ID NO: 22254 - DNA, 201 bp, Homo sapiens
tagtcacaattgcctcttgacacccagaaaattggaaagtgccacaaaaagcactgctaacaccttgcatttctttatctttgtttgcagttaaaacagtygaaaggatgtaggaaaatggcttctgcttcgcttctgtgttcattatcttagatgaattgcttctaatttgcagaagcgaattctcatccagaatttgaa

SEQ ID NO: 22255 - DNA, 201 bp, Homo sapiens
gcgtgcgcgcgtgtgtgtgtgcgtgcacacacgtgcactttaacactggattaatataaaaattagatattgagtctcccagtttcagttctgacattttragatcaaggaagttgttaatcttggctaggtgtggtggctcacacctgtaatcccaacactttgggaggccaaggcaggaggattgtttgagcccaggag

SEQ ID NO: 22256 - DNA, 201 bp, Homo sapiens
ggtcaaaatacatggccagtaatgtagtacatccttgggaacaggacattatttgcttcactcactggtggggagagggtcctaccatccatctcgaggcscttgggcaataggttttacttgggaaggtgatgtcagggaaggcaggtagccaggtgtgcttttactgccctcagggagttcctagtctacttgtgcatg

SEQ ID NO: 22257 - DNA, 201 bp, Homo sapiens
ttaactagtatatttttgcaggtatttgctttaggagaagctcctaagaaaaaatgattcaatcttaaaaaggccaaaatctaaatgaatatttatgtttrgacattaattatgtcattctgccagaccagtttttaaaaattatcagacacaccttcactaaactttgttagacaacttcaagttatatataagaataga

SEQ ID NO: 22258 - DNA, 201 bp, Homo sapiens
gtatttattctcccttgttcattcccatgcagttgaagctaaaactctttgtgatgaatgttgagcctctgtcctatagaggacctcccctgcttaaccgmgagttcctcaatgtaactgtgtctcctaggtcgtataagaaggcattgattatttattttacaattaggaatttaggcaaagcccttagattcagagatg

SEQ ID NO: 22259 - DNA, 201 bp, Homo sapiens
ttcattgctctcagtattgggtggcgtattcacaaagagaatttaaagaaatgacttatttccctcagcaacataattttatttggtaaaataatcaaatrctcagaaaaaacaactcttgtttctgtattaaagatgccactgatactagtagatttttagaaacgcacttgtatatggcataggtttgtcactttggat

SEQ ID NO: 22260 - DNA, 201 bp, Homo sapiens
gcacttcatgtgaaaatttataatggattatcattgcttctagttgctcttagtgggcaaacataaaatatatatgtacacacacgaatatatatatacayacacacacacacacacatacacacacacatacatatacatatatatctgtttctgtgttgatctatctatatttaaaaatctacagtgtgtaatgctatt

SEQ ID NO: 22261 - DNA, 201 bp, Homo sapiens
gggcacttcatgtgaaaatttataatggattatcattgcttctagttgctcttagtgggcaaacataaaatatatatgtacacacacgaatatatatatayacacacacacacacacacatacacacacacatacatatacatatatatctgtttctgtgttgatctatctatatttaaaaatctacagtgtgtaatgcta

SEQ ID NO: 22262 - DNA, 201 bp, Homo sapiens
gcccctggtattagtcagttcttgcactgctgtaaagaaatacctgagactgagtaatttataaagaaaagaggtttaattggctcatggttctacaggcygtacaggaagcatagcggcctctgcttctggggagacctcaggaaacttactgaggtcatggcggaaggtaaagaggaagcaggctcgacttacatgggc

SEQ ID NO: 22263 - DNA, 201 bp, Homo sapiens
agtcatttggtttgattgccccacaaagcataagatgtaaactgattaagggtatgaaagcaaagtgaaagacctcagatcttgtgcacattttgttttcytattatttcttttattgactgtagtgcatgatacctaatcaaggctccaatgtcttgcacaattcctactttaatgctagtggttttcagtgtccttaca

SEQ ID NO: 22264 - DNA, 201 bp, Homo sapiens
cagggttttaccgtgttggccaggctggtctcgaactcaggtgattcacctgcctcagcctcccaaagtgctggaattacaggcgtgaaccaccttgcccrgccaagaacatttttaatgcttgtttatataagaagatatttggctaggcctttgattttttgaaaggaagatcctaaatataaagtgcatgacctatta

SEQ ID NO: 22265 - DNA, 201 bp, Homo sapiens
cttggctcactgcaacctccgcctctcggattcaaacgattctcctgcctcagcctccagagtagctgggactacaggtgcgcgccaccacgcccggctawtttttgtatttttagtagagacgggattttgccttcttggccaggctgctctcgaactccggacctcaggtgatccacccacctttgcctcccaaagtgt

SEQ ID NO: 22266 - DNA, 201 bp, Homo sapiens
gatgaaattgtaaaagtcatttggtttgattgccccacaaagcataagatgtaaactgattaagggtatgaaagcaaagtgaaagacctcagatcttgtgmacattttgttttcctattatttcttttattgactgtagtgcatgatacctaatcaaggctccaatgtcttgcacaattcctactttaatgctagtggttt

SEQ ID NO: 22267 - DNA, 201 bp, Homo sapiens
attacttgcttcaatttgcacctttcataaggattaaaataaattgagatcttaagaacttatttatttatttatttatttatttatttatttatttattwgagatggagtttcactcttttgcccaggctggagtgaagccgcacaatctccgctcactataacctccgcctcccaggttcaagtgattctcctgcttca

SEQ ID NO: 22268 - DNA, 201 bp, Homo sapiens
gctggagtgcagtggcatgatcttagctcttggcaacctcggactgccgggttcaagcgattcttgtgcctcagccttctgagtagatgggattacaggtkcctgccaccacgccaggctaattttttgtatttttagtagagatagggtttcaccatgttgactgggctggtcttaaaatcctgacctcaactgatctgc

SEQ ID NO: 22269 - DNA, 201 bp, Homo sapiens
ttactttttagcacaagaagaatagcatcactaccaaaaccagctgagatatcttattttatttatttatttatttatttatttatttatttatttatttagatagagtctcactctgttgcccaggctggagtgcagtggcatgatcttagctcttggcaacctcggactgccgggttcaagcgattcttgtgcctcagc

SEQ ID NO: 22270 - DNA, 201 bp, Homo sapiens
attactttttagcacaagaagaatagcatcactaccaaaaccagctgagatatcttattttatttatttatttatttatttatttatttatttatttatttagatagagtctcactctgttgcccaggctggagtgcagtggcatgatcttagctcttggcaacctcggactgccgggttcaagcgattcttgtgcctcag

SEQ ID NO: 22271 - DNA, 201 bp, Homo sapiens
tacagccactctgggggacagactgacagttctttaatgaaaataaacacactctcatgatctgacccagctgaaaacttttgtccacacaaaaacttacrcatagatgtttatagcagttttatttataactactccagtttggaagccaccaggatgtcctacactgggtgaatgtaaaaagtgtggtagatccagaca

SEQ ID NO: 22272 - DNA, 201 bp, Homo sapiens
cctacccccaccaagcttgagtgtcccagttcgacttcagactgctgtgctggtagtgagaatttcaagccagtggatcttagcttgctggactccatagrggtgggatctgctgagctagaccacttggctccctgacttcagccccctttccaagggagtgaatggttctgtcttgctggtgttacaggtgccaccggg

SEQ ID NO: 22273 - DNA, 201 bp, Homo sapiens
attgtggagaatcctaaatgaagttgattttctggacagtttgatgatttcttaaagatcgatgaactgctggtttctttttaaagggcattcacaaaagygaccaaaacttgggctaaagtattgctttcaaatatacttatgtgtagcttgtatttgtgagtgtgtgtatgtgtttgtgtgtgtgtgagattttgatag

SEQ ID NO: 22274 - DNA, 201 bp, Homo sapiens
agaaatagaaggatgattatcttaagttatgtttacactttggtaatatttgaaaatggatgtatatactggaaatgtctgtaagtgtcttgtttttgcayctaatttatgatctattatattgcattttcttaaatatcttagaagtatttttctttataactttgtatattgaatgtttagataaatgtccaactgaca

SEQ ID NO: 22275 - DNA, 201 bp, Homo sapiens
cctaatgtgtactgtgtcattttgggactgtggaaaccttggattctgatctagaccttgtttcaccccttttgctttcgttttgcaagacttggaggggrgacgggaacatcaaggactctgaaaaatgtgtggttgaggtgttttgcctcagatgttgggaggggttaaggtgcgggagaagatacaggctgagagaga

SEQ ID NO: 22276 - DNA, 201 bp, Homo sapiens
ggtagatgacccaggaaagttgcgagccagtgtattgtgactgtgatatggactgttggtggagtacataaatagaacattacctctgaccctgtatgtgygtgtataaattgattacaacagaatcccatagtaacatggaatttaagaaaatcatttgtgttataaggggactcctaagtccagataatcaaaaacaaa

SEQ ID NO: 22277 - DNA, 201 bp, Homo sapiens
aataatgagaattgactacaagtagttttgccaaaaattgtaaattatggaataacctgtgtagtcacttaaatgcttgcagaatctggagaattaatgaraacttttgatgtggtataacatattaaaatgactttactgtaacatctttgatttaaataatgaaattaaccacatttgtataatgtcttataaaatttt

SEQ ID NO: 22278 - DNA, 201 bp, Homo sapiens
tcatcactggattaagctgacaataaactactgttattcttcaagaaacatccatcttctgcacagaccaaagtagtgatttaatttgagtgcacagctcrgttgtactttgtcttgggatgtgaaaagccagaaagaatgtcactcccatagtgatatcactcccacagaacaataaggataaagacagataatctacac

SEQ ID NO: 22279 - DNA, 201 bp, Homo sapiens
ggagacagggacatttatttatgattcatatcaaactggaaggtagttttcaattgtgactatacactaaagattgtcacttgattcacatgtattcaggrcttataaaactaagtcatcatacttagaaatggtttcatgctatcacggtgtctgtcagaattagcaggcaatatctcattataggaaattttaagtata

SEQ ID NO: 22280 - DNA, 201 bp, Homo sapiens
gacagggacatttatttatgattcatatcaaactggaaggtagttttcaattgtgactatacactaaagattgtcacttgattcacatgtattcagggctyataaaactaagtcatcatacttagaaatggtttcatgctatcacggtgtctgtcagaattagcaggcaatatctcattataggaaattttaagtatatta

SEQ ID NO: 22281 - DNA, 201 bp, Homo sapiens
ttatgattcatatcaaactggaaggtagttttcaattgtgactatacactaaagattgtcacttgattcacatgtattcagggcttataaaactaagtcaycatacttagaaatggtttcatgctatcacggtgtctgtcagaattagcaggcaatatctcattataggaaattttaagtatattagtgattttttaaaaa

SEQ ID NO: 22282 - DNA, 201 bp, Homo sapiens
gtcatcatacttagaaatggtttcatgctatcacggtgtctgtcagaattagcaggcaatatctcattataggaaattttaagtatattagtgattttttwaaaaatgtaaaattttgagattttaggatttggagaataactacctgagcccatcctctttgttgtgaattagcaatgggacagaagtatttgtaatata

SEQ ID NO: 22283 - DNA, 201 bp, Homo sapiens
gtacccaggggttacatcagttcatggggttttaaaatcacagatactcacagaggaatgagagatacaggatacaacttcagcaggggcacagccaagcytcatgggaaactgaaaaatattcttcaaaatatccctgaatctggtgatttgccactgtagagacgtaggtgtcttctcggaagtggcctctcattgcct

SEQ ID NO: 22284 - DNA, 201 bp, Homo sapiens
cactgatttcttggttatttcttggttacaggctgtcatggtggtcacctgatccttacctgatgttactggttaccttgagattttatcagtgtctgtgrtctcttcatcagttctctccaaaggtttctctcactgattatctttcaatattcttagacttgaatgaagcagtcccagagacagagcgcctggattcaa

SEQ ID NO: 22285 - DNA, 201 bp, Homo sapiens
gagtatttattctcccttgttcattcccatgcagttgaagctaaaactctttgtgatgaatgttgagcctctgtcctatagaggacctcccctgcttaacygagagttcctcaatgtaactgtgtctcctaggtcgtataagaaggcattgattatttattttacaattaggaatttaggcaaagcccttagattcagaga

SEQ ID NO: 22286 - DNA, 201 bp, Homo sapiens
ttcctcagagatacccaattataagagtatgggactgcagagaaaatatttatatgtttctacacagctagagctttctaggcatttttactagaatgtgsaacctaagctaaaaaacaagcctcagaaaataaattatgaggctgagtgttgtgattcacacctgtaatcgcagcactttgggaggccaaggcaggaggt

SEQ ID NO: 22287 - DNA, 201 bp, Homo sapiens
aacagctttcactgtgttacttggcagaaatcttctttatgggcagtctgcagtctgaatctaagagctacagtttaattcttcctgaaagctgtcctgtrttcagtcactgcttcatcagtatggcctatggtatagaaatgggacagccactctagatggatgagaggtggacaggcaggatagatacagcactaggtt

SEQ ID NO: 22288 - DNA, 201 bp, Homo sapiens
tctgtgcattagtggaggaatattttaagtacctttcataataattattactctgttcaagttttcaatttcagggggacgattttggtattttgcatttytcaagaaatttagatatttcctttaggctattatacttattaacttatatttttataaaataatttttaagtattgaagtattttatatttataagtagt

SEQ ID NO: 22289 - DNA, 201 bp, Homo sapiens
ctgagtcttcaggtgaacgaaccactctcagaagtgcctctcctcacaggaatgcatatcgaactgagtttcaggcactgaaaagtacctttgacaaaccyaagtcagatggggaacaaaaaacaaaagaaggtgagggctcccagcagagcagggggaggaaatatggctccaatgtcaacagaattaaaaacctattta

SEQ ID NO: 22290 - DNA, 201 bp, Homo sapiens
gtatctccaaattgtgtttggaacttttttttttttttttttaccaaagaccaatcagaatgataactttttgacttttaacttcccatttcaatgagtartctcttctgtttgccacgtggctaagccatttggaaaaaaaaatgtatgttatttgactagacataaattcaaataagtaaatgaattcagaaattcatt

SEQ ID NO: 22291 - DNA, 201 bp, Homo sapiens
atgtgtttgtgtgtgtgtgagattttgataggtatctccaaattgtgtttggaacttttttttttttttttttaccaaagaccaatcagaatgataacttyttgacttttaacttcccatttcaatgagtaatctcttctgtttgccacgtggctaagccatttggaaaaaaaaatgtatgttatttgactagacataaat

SEQ ID NO: 22292 - DNA, 201 bp, Homo sapiens
aagtcacttctatcactttttcatgagattatgttttgtatattttatagtttttggctgccagggcctctttgctatttttgataattaatcgttgtttrtaactgttaaaacatctgaatttctttattctttttgaaacacctctatgatttagaaacaagaagcccagcggaaagtcatgtagaatgactgactatt

SEQ ID NO: 22293 - DNA, 201 bp, Homo sapiens
tttgggaggctgaggcaggcggatcacaatgtcaggggatcaagaccatcctggctaacacggtgaaaccccgtctctactaaaaatacaaaaaaaattakcctggtgtggtggcgggtgcctgtagtcccagctactcaggaggctgaggcaggagagtggtgtgaacctgggagtcagaggttgcagtgagccgagatc

SEQ ID NO: 22294 - DNA, 201 bp, Homo sapiens
gtttctgagttcagtaggacttaataccttaaatagaacttaattcctgaggtaatcagaaatgagatattttctttcattttattttctctcattattgkatatatatgaaaatggctttaggttatgtttactagttttataacctgacttcttagttacactgctaatcttttccagtttattttttagttatattct

SEQ ID NO: 22295 - DNA, 201 bp, Homo sapiens
ttttctttccctcaaatatctgacttcagtaagcaatgattgttatgagataaatgtttgctcttaattatatcaacttctttttatttttttgtttctartaatcactttgttttctggttttcgctttgtggtctgtgtctttgttactttcacttaagtagtgatcttcaaacagttaatttatataatctgtgattt

SEQ ID NO: 22296 - DNA, 201 bp, Homo sapiens
aacctccgcctgctgggttcaagcgattctcctgcctcagcttcctgagtagctgggattacagatgctcaccacaatgcctggctaatttttgtattttyagtagtgacggggtttcgccatattggccaggctggtctccaactcctgacctcaagtgatccacctgccttggcctcccaaagtgctgagattacaggc

SEQ ID NO: 22297 - DNA, 201 bp, Homo sapiens
accagaggagataatgatcatccggtccagtttttcctcagagatacccaattataagagtatgggactgcagagaaaatatttatatgtttctacacagytagagctttctaggcatttttactagaatgtggaacctaagctaaaaaacaagcctcagaaaataaattatgaggctgagtgttgtgattcacacctgta

SEQ ID NO: 22298 - DNA, 201 bp, Homo sapiens
ggtagctgcacttctccttttcctcacctcctcattatcacctacctgttatttctctctttaggcatttttgaacagaattgaaggaaaacgccattcargtctgctatttgcctgtaaacagagtggatacaatctcactgaccacccaatagtcactgttaaaatcttttcaattcttatgatgacagctgatggata

SEQ ID NO: 22299 - DNA, 201 bp, Homo sapiens
aagactagttctctgtgttgcatttttatgccaactttagctgctgccagaatcttggatgccctaaataccagtgcttacagtggaagccagcagggtgkaccagacagtgaaaaagattcctttgctcatgttgtcagcttatctgaaatcttgaacagctgtttgaatgaatgaatgaagtacatattaaagggagtt

SEQ ID NO: 22300 - DNA, 201 bp, Homo sapiens
acccatcaaaaggagagaagtctttttttatattgtctaccatatgatacaaaaattaattttggtaatattaacaaatgttccttttttggtaatacttsattcctgacataaacattacatctatgttattaagtcatgtcttctagaatacagcctgaactatgcataagacttctttgttttgaagttataaatttt

SEQ ID NO: 22301 - DNA, 201 bp, Homo sapiens
ttatgattaaagtcatttaatcagataagatcttatgaaaatggttcctgattttaggtaatgtggttattggtaccacctcagtcctggaaggcagtcakgtcagcctcaaccttttggccagggtttttctggacagtagaattgctctaacccctagacttcctccttgtatgccaaggtttgagtctatgtaattat

SEQ ID NO: 22302 - DNA, 201 bp, Homo sapiens
ttacttctatgagatcaacatttttttagcttcctcatatgaatgagacatgtggtgtttaactttctgtttttggcttattttacttaacataatgtccrccagttccatccttgttattgcaaattacaggatttccttcttttttatggctgaatagtactccattgtgtataaatacaccacattttctttatctct

SEQ ID NO: 22303 - DNA, 201 bp, Homo sapiens
taggtccatcccattcataaaaacaatgcaaaaaggtcctaaacaaaatattagcaaaccatatgaagcaacatataaaagagataatatatcatagctasgttgggtttagccaggaatgcaagtatggtttaacattggaaaatctgtcactttttatatttgacattgtactggaaggcaagtaaaagaaattaaaga

SEQ ID NO: 22304 - DNA, 201 bp, Homo sapiens
atttgaacaattgaaaaattttaaatgtatatctgaatatatctgtgattcatgatttaatttctgtttaatcgaagtattgatcacttgtttttttttttctttctttctcttttcttttttttaataatctgaaaggttgccatggaggatttcaataaatctctcagacaatcagcactatttcatgacactcggggg

SEQ ID NO: 22305 - DNA, 201 bp, Homo sapiens
cgaaatcccttcaccacaaagccaactgttagaagatgctgaagctaatttggttggaagggaggcagcaaagcaacagaggaaagaacttgcaggtggtratttcacctctcctgatgcttctgcatccagttgtggaaaagaagtacctgaagattcaaataattttgatggttcccatgtgtacatgcacagtgacta

SEQ ID NO: 22306 - DNA, 201 bp, Homo sapiens
gtatcacctgtgtggcactcttttgtgacatttgtatcttgtacactgtcactatcatagtcttaaatttctttatgtgattaatatacatgtccaaataytatatagcactgggcacttttcacaggatcatccacaaaacttggggtgagtgtgaaggatcatattgtattagagtctttacaaagtttcatgttacag

SEQ ID NO: 22307 - DNA, 201 bp, Homo sapiens
agttaagggtaaattttctggagaaattaacgtatatactggtatttttttttaaccatgacagcgttttgttgttgttgttgttgttgttgttgttgttkttttgagacagagtctcattctgttgcccaggctggagtgcagtggcgcgatcttggctcactgcagccttcgcctcctgggttcaatctattctcctgc

SEQ ID NO: 22308 - DNA, 201 bp, Homo sapiens
acgatggcccttcatattccaagttcactgagactcgaaagatgtttgagagaagtgtgcatgaatcaggacagaacaaccgctattccccaaagaaagaraaagctggagggagtgaacctcaggatgaatggggaggttccaagtccaacagaggcagtactgattccttggacagccttagctcccgaactgaggctg

SEQ ID NO: 22309 - DNA, 201 bp, Homo sapiens
accaaagagcaatgcagaaaaagaaaaggtctgcagaaagtggctgagtgggagaaagaggtgtaatctagttacctgtttctctgcagcccttatttggycaaagaatataagttatcaagaaaagtaggtagatgacttgttctctaagaatattttaactcacaacccaactttaacaaatattgaaggcagtgagat

SEQ ID NO: 22310 - DNA, 201 bp, Homo sapiens
aggaccgagcagtggtcaaaaagaaactcaaggaaatgaagatgtctctagagaaggctcggaaggcccaagagaaaatggaaaaacaaagagaaaagctraggagaaaggagcaagagcaaatgcagaggaagtccaaaaagacagaaaagatgacgtcaactacagccgagggtgctggtgagcagtaacacataccct

SEQ ID NO: 22311 - DNA, 201 bp, Homo sapiens
aagaaatgacttatttccctcagcaacataattttatttggtaaaataatcaaatgctcagaaaaaacaactcttgtttctgtattaaagatgccactgayactagtagatttttagaaacgcacttgtatatggcataggtttgtcactttggatctttaaactaacatttgtttataacattggctgcatgaggcatgc

SEQ ID NO: 22312 - DNA, 201 bp, Homo sapiens
tatttattgaaccacaccccttctcatactatctttccccccaaaggaagtgaattaattcactacctcttgttattacagtttttcattttaaaaacaaraaacacttaagttttccttttctcttatttcaaagttatatatttagccacctgagttatgctatgcgtcaaaatgtttgttgttgttgttgttgttggt

SEQ ID NO: 22313 - DNA, 201 bp, Homo sapiens
tacagatgagaaaatcgttagcattttgctattgcagtattttgacaccagcagcagcaacaatagcggtcactcgttttgagcacctaccatgtgccagmccttgtgttaaatacataggcaccatctaacttaatcttatgacagctttcttatgctaaggaactgttttgtccttactttatagatgaaaagattaaa

SEQ ID NO: 22314 - DNA, 201 bp, Homo sapiens
attcatcacactagttattgcctgaatactttgtttgtttgtttgtttttgtttgtgtgtgtgtgtgtgtctgtgttgtgttttgttttttttttttttttgagacagaatctcactctgttgcctaggctggagtgcagtggtgcaatctcggctcactgtaacctctgcctcctgggttcaagtgattctacttcctca

SEQ ID NO: 22315 - DNA, 201 bp, Homo sapiens
attcatcttgaatccttggggcaggttggggccagtaaatgaggaggacagaggcatggaagttttcttgggcttgggtagaagctggtgcctaccccaamctgggaatataagtagaggaacaggtatatatagaggaaaggaaaagttttacttcagaaatgaccaatttgcttataaaagattcatgtgttgaggtct

SEQ ID NO: 22316 - DNA, 201 bp, Homo sapiens
tattcatcacactagttattgcctgaatactttgtttgtttgtttgtttttgtttgtgtgtgtgtgtgtgtctgtgttgtgttttgttttttttttttttttgagacagaatctcactctgttgcctaggctggagtgcagtggtgcaatctcggctcactgtaacctctgcctcctgggttcaagtgattctacttcctc

SEQ ID NO: 22317 - DNA, 201 bp, Homo sapiens
gatttttctctcttctggccctcatctctccaaccccaaatgctttttttgttgcattagtttatggtgttgtcctggagaaataagggatggtgaaaacmatcataatcataacgtcatgcagtcagttagcatattctaggcactgtggttaactctttcatatcactacaatgaattctcatagcaacctctttaaat

SEQ ID NO: 22318 - DNA, 201 bp, Homo sapiens
tttgaccagaggaataaaaaggaaaagacaccaccaggtatggagaagctgagttaggagaccctatgaggtggtgccctctaaagaggagcagtagacartgacaggaaagaatgattcaaggacccttgagacataccttgactaggtaacaggtaagaaagtgaggcaaaactatcatgggcttcacgcctcagaaca

SEQ ID NO: 22319 - DNA, 201 bp, Homo sapiens
tcagtgttcctgggaacgcactttggcaaatgtgtgagataaagatgtaaggttgcctagcaccaagctctgtgataggcagaatcaggcttttagtcgcrtgatgtccaaataactgcaacactcatgggttacagagtgttttcgtgtacattgcctcagctggtcttctcagcgctcattgtaacatctcccagctac

SEQ ID NO: 22320 - DNA, 201 bp, Homo sapiens
tgttgaaaacattttttagctatgtggagacttgcctgaatgctgtctcctatttaggtagaggccaataagatgatagctggaaaagcttcgattgtctrtcatgaagaccaggatggaataaaagaaaaataagtaatgcagttgtgatattctgcagtatacttcggctctcttaataagatcatgctgtaagcagtg

SEQ ID NO: 22321 - DNA, 201 bp, Homo sapiens
aagttacacatacttaaaatatgattggttttgttattataaaatgttaacagtatgaatttgattctcctaaatatttcatattttaaatctcctcagargtatattatcccaagcaattttctcaattatttgaggctgcgtgaagaatttgagcaagatgttcatcagatttttgttagttcatttaagatatatcaa

SEQ ID NO: 22322 - DNA, 201 bp, Homo sapiens
atggatacagagaagtgaaacgctcccttatggctagtgggaatgcagaatttcactgccacttaggaaaacagtttggaagttttttttaaagttaaatrtacacttaactttttgatccagcaattccactccaagatattttccaatagaaatgaaaacatatgtctacataaagtcttgcatgtgaatgacaacttt

SEQ ID NO: 22323 - DNA, 201 bp, Homo sapiens
ttcctctcctcactatgtacgctcaagtttttgtcctcattttgtttctttttaattctggagcaacctttcactttatctgagaactaaaattctgtccyttttcttgaaaaataaacatttatcctattacatcacctacatagttacactttttcttaaaactgtccctgctaaaatagactcagttacccatattac

SEQ ID NO: 22324 - DNA, 201 bp, Homo sapiens
actaagtggagcacagaggatttttttagggcaatgaaaccattctgtatgatactataatggtggatacatgtcatccatcatacatttgtcaaaacccrtagaatgtgcaataccaagagtgaatgcttatgtcagctgtgggctttgaacaataatgatgtgtctttaaaggtttttttttttttctgtaatatgtga

SEQ ID NO: 22325 - DNA, 201 bp, Homo sapiens
taatgctttgcatagagaaggtttgaaataaatcttttgagtgaacattcagctgtctacatttaaaacaaagaatgtggaatatgactatcttgtgtccyaaattaacttattaacagtcttcctccttttcagagtagttaaggaaataacctctttgcccctttaataaattatatataatgatagtagtatttccag

SEQ ID NO: 22326 - DNA, 201 bp, Homo sapiens
aatgtttttcagataggtatctaattcttttcataatttattaaatagaccactctaatttgaatagaaaaggagtggaacagaatagaatataaaaatgratctatcccagagctcaaactatattgccttaataagcgaagttttattatgtgttttgatatccactagggcctgattctacccttattctttttcaaa

SEQ ID NO: 22327 - DNA, 201 bp, Homo sapiens
tgggggacagagtgagactccatctcaaataaataaacaaacacacaaacaaaccaagcttcagttttttctcctgtaaaattgaaataatgtctattttrtggttttatggtaagaaacaaattacatgataaatatggtcagctaagctcagctgagaatcagatgcctttggtgggttgtagtttgatggtactcttc

SEQ ID NO: 22328 - DNA, 201 bp, Homo sapiens
atctgtcgaatgtttccctgtggaaaagaggattttaatatatttttctcttgctgacttgagtaaagatttctgattatcctagaacagagataatggargtaatttttcatggaaaaactatatactttcgtttgtaagctgttagaattggcattttgttggttgggtgccaggctgctagactatgcaccacgtggg

SEQ ID NO: 22329 - DNA, 201 bp, Homo sapiens
attagttattgatttgcttttgtaaagcaacagcagaaaatgttgcccttatctgattgtaatatttctagaactagagctctcttaaaacatttcctgcraagatatttttcactttttaaagaaaaatgtttccatgctctcacaggataagtagagagagggcaaaagttcagtctcactatttaagtttctgtgtaa

SEQ ID NO: 22330 - DNA, 201 bp, Homo sapiens
gtctaaaagttggtttattttatttatttaattctatgaaaaagaatctagaaaagttataaaatgcatgggataataacattaagttatctttatggaaktttccactaccatgtagggaagctataaattgctgcctacttaatagcaaacagttacttatttaaaaaagagctgtaattacaggccatcaactacatc

SEQ ID NO: 22331 - DNA, 201 bp, Homo sapiens
ggaaggggggagggatagcattagaagatatacctaatgtaaataaggagttaatgggtgcagcacaccatcatggcacatggatacatatgtaacaaacytgcacgttgtgcacatgtacactagaacttaaagtataatgaagaaaatatatattaaaaaaagactcttgctttaaagaaagaggttgctgcctactct

SEQ ID NO: 22332 - DNA, 201 bp, Homo sapiens
aagaaagccctctgtaaaaggaggattgaaagagaaaatttcagcttcccctttctgactgcttactatcattacagggcgcctttgcgaaggaattccarcaagggaaagaagtggaaagaaaaagaaaaagaagccagtaggttttctgcaggtagcaggtacggttgtgtgattaagaacacgtgtatttctatacct

SEQ ID NO: 22333 - DNA, 201 bp, Homo sapiens
catagacattcaacttcactggcaaaaatcaaacaattggcaaagataaagtgtcacagtaaaatgtgatagccagcacatggaaaaacaggaaaattcayaaaactgtttcattaaaataatttggcattatccattaaaatagaagatgtgaaaatcctatggcccgacaaatttacttcgatgtgtatatatatcctc

SEQ ID NO: 22334 - DNA, 201 bp, Homo sapiens
tatttattctcccttgttcattcccatgcagttgaagctaaaactctttgtgatgaatgttgagcctctgtcctatagaggacctcccctgcttaaccgaragttcctcaatgtaactgtgtctcctaggtcgtataagaaggcattgattatttattttacaattaggaatttaggcaaagcccttagattcagagatgc

SEQ ID NO: 22335 - DNA, 201 bp, Homo sapiens
gagagttcctcaatgtaactgtgtctcctaggtcgtataagaaggcattgattatttattttacaattaggaatttaggcaaagcccttagattcagagaygcattgacttttgaattgtgactttaaaaataataataattgatctttttcacaaatgtgtatatcctagatgatgccaaagatcccaaatcactaaggg

SEQ ID NO: 22336 - DNA, 201 bp, Homo sapiens
taaccctggttttaatatttatgtaactttttgcagaaataatttaaaatagggagaggtaactttcaatcccaaacatagatcaaatacttagtaatttrtttgacctataatgctggttctcaaccctggctactctttacaatcacctgggagcttcttaaaattaccagtgtgatcttaaccccagagattctgatt

SEQ ID NO: 22337 - DNA, 201 bp, Homo sapiens
gtgttccacccctcaccccggtggatagcaatgtgcccttctcgtctgaccacatagctgaatttcaagaagaaccactggacccagaaatggggcctctstcctctatgtggggagacacttcactgttttctacttcaaagtctgatcatgatgtggaagaatctccttgccatcaccaaaccaccaacaagaaaatat

SEQ ID NO: 22338 - DNA, 201 bp, Homo sapiens
cagtgtgtgcacatgacaggcctaacagatctcaagaaaactgttctttcatggctgttgatttcatgtagatttttgcatgtacacttcacatacacatrtgtttacatctctatgatgtatattagtagccatttcctttctaacattggtacttagtagtttgatttttttttaaacaaatcttattttatgtagtaa

SEQ ID NO: 22339 - DNA, 201 bp, Homo sapiens
ttctgcttatccgttttacaaaaactgtatgaagatggctacatacttcttggtgtttttttgtttgtttttgagacagaatcttactctgtcacccaggytggggtacagtagtgtaaccatggctcactgcatccttgaccttggggctcaagtggtccttccatctcagcctcccaagtagcagggactacagatata

SEQ ID NO: 22340 - DNA, 201 bp, Homo sapiens
aaacacttggacacaggaaggggaacatcacacaccggggcctgtcatggggtcggggaaggggggagggatagcattagaagatatacctaatgtaaatraggagttaatgggtgcagcacaccatcatggcacatggatacatatgtaacaaacctgcacgttgtgcacatgtacactagaacttaaagtataatgaag

SEQ ID NO: 22341 - DNA, 201 bp, Homo sapiens
acattctgttatggtagcttaataataatccttaaaagcaggaacagttagcctttgaactgtgttcttttccagttgtttggctcctctaagtattttcwtttgtctatgaattttagaattagcttgtcaatttatacaaaagagcctgctggtattttgatttgtattgtttggaatctgtgaatcaatttggggaga

SEQ ID NO: 22342 - DNA, 201 bp, Homo sapiens
tatggtctcctggaggtgagacagggtttatttgctaatagcctgttgagcaattcagttgtcttaccattgtctcctttccctgcctgatcttttttcaytgaatggccataataattttttttttttttgagagacggagtttcgcgcttgttgcccaggctggagtgcaatgctgcgatcttggctcatcgcaacctc

SEQ ID NO: 22343 - DNA, 201 bp, Homo sapiens
atgaaaagatcatgattttaactgagtaatttaggacagaggttggcaaactatggcccctaggccaaatctagacctctgtttgcttttgtaaataaagktttattgaatacagccatactcatgcctgtaagtattgtctatggctgctttcctactgtaaaggcagagcaagtagttgtctgccttcccagcactttg

SEQ ID NO: 22344 - DNA, 201 bp, Homo sapiens
taaatccagcctttttgttcagcataattgtccatgttgtgcaagtatcaatactttctaacttcttgttgctagctaggattcttttttttatggctgtrccacaattcatttgtttgttcgcctgatgacagatgtgggaattgttttcagttttgggtattacaaatagagctgctatgaacagatgtatacaaattt

SEQ ID NO: 22345 - DNA, 201 bp, Homo sapiens
ttctggatttcagttttctcatgtgcaaaataaggattatagagccaaatgagacccaaggttgtcttaagcactaacattatgtgatactttgaatattrcacagtggaaaacattaaacaagtgtgtgctaaatcggagttgttcaccatttctctctcatttttcttttttttaacttttaaaactgacacgtaataa

SEQ ID NO: 22346 - DNA, 201 bp, Homo sapiens
aactcatccatttttatggctgcatagtattccatggtgtatatgtggcacattttctttatccagtctatcattgatgggcatttgggttggttccaagyctttgctattgtggacagtgctgcaataaacatacatgtgcatgtgtctttatagtagaatgatttataatatcctttgagtatatacccagtaatgaga

SEQ ID NO: 22347 - DNA, 201 bp, Homo sapiens
gttgtacagttttaaaaacagaattattcttttgaattgcgtttcataagttcagttcttattgcctttcccacctcaatgattatcccagaaatctgaamattttataataatgaatgtaggcttatgataaagtggtttcaattaacaaaagtattgctgtgataaagtagtttcacctttgagtaaaacttgttgatt

SEQ ID NO: 22348 - DNA, 201 bp, Homo sapiens
tctggagtttttctctgccaagctctgagctcactagtactcagccctacaaactctggcctcttcagtctccctagagtcttatttttaactcctcaacygagtgagactgctgtgatctacttgggattcctagcctgcactgttatggaaagggtcttatggaaaagggatttactcagtttttttccttcactcatg

SEQ ID NO: 22349 - DNA, 201 bp, Homo sapiens
cttcaacgaatgcctattgaattcatccttattttctaaggaaagtggcaatggatcagaacgagaagatccaggttttagttctggttttaatggtgatycactgtgaggaaaagaccaggttggctgtcttctccaatctttagtcttcccgtgtctaaaatgagttcagaagagcctacagttggagcgtccactggg

SEQ ID NO: 22350 - DNA, 201 bp, Homo sapiens
  misc_feature (1)...(201): n = A,T,C or G, or insertion/deletion polymorphism (see Tables 1-2)
tctatgtggggagacacttcactgttttctacttcaaagtctgatcatgatgtggaagaatctccttgccatcaccaaaccaccaacaagaaaatattacnagaaaaaggtattgttaatttctttttctgacttcataacacctcagcttgtacagtataaaaatgactttttctcataatcataagtcatttgttttct

SEQ ID NO: 22351 - DNA, 201 bp, Homo sapiens
cattttttttcatatctgagggacatcagtggaaattaggatggagaagtcccattataactggctaaatgataagcatctaacggaatatcaaattagargaagtaaaagatttttttctagagatttgtaaaacaggttatatgccagtagaaggcatgaaaatattttcctcgttcctgttatataaacaacctaata

SEQ ID NO: 22352 - DNA, 201 bp, Homo sapiens
gaactttaccttcatagaatttaattgatttgcccagggttatgcagcaggcagttaatgtcaacctggggcttgctcctcctgtgtagatgtttttccawcatactatgccaccttcagttacttatgcatctaatgatgcttaaatttctttataaaatttggaaataatctcaatatcatagactaaggaagaaacac

SEQ ID NO: 22353 - DNA, 201 bp, Homo sapiens
aaaccacagcttgtcaagggcaggtggccatcagcacactgcttcaccacagtcgatgcctgctttgaacccacagctagacttctagattggctgcctcrccaccactgtatttttaaaactctggagtccccctgattcagcagtcagaaattattgtacacatacccacactacaaactagtttctaattagaatcat

SEQ ID NO: 22354 - DNA, 201 bp, Homo sapiens
ctgagctggaatccaaggtagtagtccttacttttccattaggcaagtctctgaattcctgggaccttggtttcctaccaaaaaataagtggattgggctracactgcatggctctgacttcccattcacctctgcgtacactgtccagtatggttgcctctagtcagataaggctagtctatattgggatatgtgtagga

SEQ ID NO: 22355 - DNA, 201 bp, Homo sapiens
attccccataactgtctagcccatttttagctgcatttatcaatttaatattcagttttctttttaagtacagtatttcaaatgcctgaagcctgacaaayttacattcttaacaggcaaacacttttccatacttaaaaaagctcttgaaaatctaataagttactgtttaactgtagtgactctaaacgtcccaatata

SEQ ID NO: 22356 - DNA, 201 bp, Homo sapiens
aggtagaatcagtggacacatttctctttcagatttctattcatacaaattttcttaaacacctaagcaatatatctgttattcttaaacttagcatttakattttgatagtatggattttatttacgtgatcctcttctatttcattttaaacccctccagtatggggaagactcattaagggaatagtttcaccatctc

SEQ ID NO: 22357 - DNA, 201 bp, Homo sapiens
gagctttagatggacatgtttctcacagctgttatccattagggtctctagatcccatttagatgaggctagctttacaacctcaaactccttggtggatrttagaaccttatagaattacttcattcgatttaggtaaatacaagtctgcaatcttcctctggttgcaactaattttcttcaattaacttcttttactcc

SEQ ID NO: 22358 - DNA, 201 bp, Homo sapiens
caactaattttcttcaattaacttcttttactcctgggcttaaattctgtatttcttttatacttcatctgttctggcagtttctgaactcttaatgataytttgatgacatccagttagatgctgaatacttcacacacctgtattcaaagttagaatgacaacaacaaagatcaccttggaatgtttagctggcaattt

SEQ ID NO: 22359 - DNA, 201 bp, Homo sapiens
tcttgattgcctataaaggaattaaatatgcatttatataataaagtagttgtgaagtttttgaacataattagaaaaaagactctttgttgatcgagtayaaaatgtgcttcatgaagcgtttgattagttaaaatatgaaaaattttagttgaagagcttttaatagggcttatctttagtcagtcattttatacataa

SEQ ID NO: 22360 - DNA, 201 bp, Homo sapiens
tgcttgaacccgggaggcggaggtttgagtgagccaagatcgcaccactgcactcctgggcgatagagcgagactccgtctcaaaaaaaaaaaaaaaaaaagattgggagagtagataataataccatactttattgatgaagaactttaccttcatagaatttaattgatttgcccagggttatgcagcaggcagttaat

SEQ ID NO: 22361 - DNA, 201 bp, Homo sapiens
tttgagaaccatcggcttaatgtaacagacaaaatatttagtatatttgtaatacttatttactaaatcatgttttcttatacaacttatttcttatacarattatttcatacgtagccagttcattatttgaaaaatcaaggtcagattgcccctgttagctgatattttaacctcttgattgcctataaaggaattaaa

SEQ ID NO: 22362 - DNA, 201 bp, Homo sapiens
tgccagtgtcatataaccatctctcatattttttttccatttagcaggatcaagtataatgtagggtgtcctttttctttttcttttaatttttttttaastacagctcattggaacttagcctatttcatccagatgtgtaacatcctccttaatactatttttcttcttattcccagttactctgagaattctttccct

SEQ ID NO: 22363 - DNA, 201 bp, Homo sapiens
ggaggatatagtttccatgagcttcccatactgagaatgacattctaattcatttatgaactttttccctgaaaaagtggtagggcaagttttattgttttaagagtgttttaaaggaaaagtctaacataaagcttgcatttggatgcttgtattgttttcaccttgtactttaaaaatctttagcacaatttattgaag

SEQ ID NO: 22364 - DNA, 201 bp, Homo sapiens
tcactcttccatttttgttagtttgtattgcagtgtgttaaaatttactgtaattttcatttttcagttcagatactctgtgtttttttttttttttttttgagatggagtttttgctcttgttgcccaggctggagtgcaatggcacaattgcagctcactgcaacctccacctcccaggttcaagcaattcccctgccc

SEQ ID NO: 22365 - DNA, 201 bp, Homo sapiens
caggagactggggcagaagaaggagaaaataaactcgttttgagaaatttcatgtgatgagggttttttgttttttatgctcatgtatctggttctctttkctgcgttgactctaaaaatgaggttatccactttccaaaggacaagtttcagaataagacttgaggccacatgaattcttggacagtattttacttcttt

SEQ ID NO: 22366 - DNA, 201 bp, Homo sapiens
ttttttggtgatttttttgagtttttccttctcatttgttttgtcccctccactagcagggagcttagttatttttaaaattgtttattctgttattttaraatatatgtttgtaaatatgcgtgtgtgtgtgtgtgtgtgtgtgtgtgtatatgtatatgtccacatatgtttgtatttatatatgtgtatcttaacaaa

SEQ ID NO: 22367 - DNA, 201 bp, Homo sapiens
atgttaatgaggctggttttagaaccatatgtgaaaaaaaaccccactgacttagggtttcaaagagatgtaaaattaacactcttatctagatacaaatratgagttatctaagtattgaacacattttgaagattttatttaagtcattaatgatggaactagtcagatattataaacagttcaaagaagcacaaattt

SEQ ID NO: 22368 - DNA, 201 bp, Homo sapiens
tgttaggaaaactggctagccatatgcagaaaactgaaactggaccccttccttacaccttatacaaaaattatttcaagatggattaaagacttaaacayaacatctaaaaccataaaaaccctagaagaaaacctaggcaataccattcaggacacaagcataggcaaagacttcatgactaaaacacaaaaagcaata

SEQ ID NO: 22369 - DNA, 201 bp, Homo sapiens
cttgggtaaaatcccagactgtataaacaattcctttttaaaatggatttggttattttcaaagaaaagatacattttctgtattaatgcttaaatttccytaagagcttttatgataattaagcttaaaataccaaagatggatatggttacatattttgctgatttcaaagtttggagaatagttaatgaacaactact

SEQ ID NO: 22370 - DNA, 201 bp, Homo sapiens
gagtacagtggttattcacaggtgtggtcataattcactgaagcttcaaactcctgggctcaagtgatcctactgcaccaagccttcctagtagcttggastacagttgcgctccactgcacccagcttataattttttgattaacagcaattctaagagaatattatgtaatgaagtgtgagaataattagtgcagtggt

SEQ ID NO: 22371 - DNA, 201 bp, Homo sapiens
tgtatatatttgatgttaaaagcttttatcaaattgtgtgtgtgtatgtatatacacacatacatgtatatgtacgtatacatacacacacacacacacayatatattttaagagatgtgttgcccaggctggagtacagtggttattcacaggtgtggtcataattcactgaagcttcaaactcctgggctcaagtgatc

SEQ ID NO: 22372 - DNA, 201 bp, Homo sapiens
tgtgttctgtttaggctattagctgagcctttatttaccatttttggtgcttttgttatcgatgttatgttttaaaaatatatacatgtttctggaactayatatatgtctgtgtgtgtatacgtatatgtacacatatatacgtctatatacatatatatgtgtatatatttgatgttaaaagcttttatcaaattgtgt

SEQ ID NO: 22373 - DNA, 201 bp, Homo sapiens
cagtctcactctgttgcccaggctggagtgcagtggcacaatcttggttcactgcaacctccacctcctggattcaagcgattctcctgcctcagcctctygaataactgggattacaggcatgcgccaccaccacactggctaatttttgtatttttagtagagaggggatttcaacatgttggccaggctggtcttgaa

SEQ ID NO: 22374 - DNA, 201 bp, Homo sapiens
attcacacctgtaatcgcagcactttgggaggccaaggcaggaggtcaatagcataataaacccctatctctacaaaaaataaaaaagttagccaggcacrgtggcacacgcctataagtcctagctactctggaagctgaggtgtgaagattgcttgagcccaggaggtccaggctgcagggagccatgactgtgccact

SEQ ID NO: 22375 - DNA, 201 bp, Homo sapiens
aaactcctgggctcaagtgatcctactgcaccaagccttcctagtagcttggactacagttgcgctccactgcacccagcttataattttttgattaacarcaattctaagagaatattatgtaatgaagtgtgagaataattagtgcagtggtttgaactttaagacatacgaattttatgttcatgaataatgtacatt

SEQ ID NO: 22376 - DNA, 201 bp, Homo sapiens
ggttaaaaatgtttttacaagtgcagctacgtagtcattgttgtttgattttcatatccactgaatattttaatgaagttctggggaagttttatttacaygctcccacctcccccacccccaggtgattatttggaaacctgtgtctgtgctgtgtggcagcctctctgatgctctgcgggtgcagtgagagagttgtat

SEQ ID NO: 22377 - DNA, 201 bp, Homo sapiens
ggaggctgggcagtgcagagttaaacatgggggaacagctcagaaatcacatagaagtttcctaattactcctttctttttttccttgcctcccctgacarccacactcactccaagattctgatactgcctctgattagggtgaggtctctgattgagaatcaatagttttgataaagagggaaaatagcatgagaacca

SEQ ID NO: 22378 - DNA, 201 bp, Homo sapiens
tgtctagcctcataaggtattttcaatactgagcatagtgccaaccagtgagctggtgcttaataaggatttgaagtaagaatcaatggctcaaaagagagagaaagtatgaagtgtaatttctgtatctgcagtcagcattcacaggctcagtagtttgagaaacctgtatttcctgctttgactttttcactatttctt

SEQ ID NO: 22379 - DNA, 201 bp, Homo sapiens
ttaatgcagccatgggatattgggatctgttgaccttgctactgctgtgtgttcagcatttcagcaacactggcaaacacaacacagttcctcttcccccyacctaacccaagaaattgaacaggaaattgatttttaaggaaaccaccattttcaggtttcctctcctggggaacattctggctggtcttcagcctgcct

SEQ ID NO: 22380 - DNA, 201 bp, Homo sapiens
gtgttaggaaaactggctagccatatgcagaaaactgaaactggaccccttccttacaccttatacaaaaattatttcaagatggattaaagacttaaacrcaacatctaaaaccataaaaaccctagaagaaaacctaggcaataccattcaggacacaagcataggcaaagacttcatgactaaaacacaaaaagcaat

SEQ ID NO: 22381 - DNA, 201 bp, Homo sapiens
aagatccagataagctcagttacaaatgaaacgggagatactacagctgataccacagaaatagaaaagatcattcaaggctactatgaaaacctttacaygcataaactagaaaatctagaggagatgtttaaattcctggaaatatacaatcaccctagattaaaccaggaagatataaaaatctctgaacagaccaat

SEQ ID NO: 22382 - DNA, 201 bp, Homo sapiens
tagcatgtaatgaaccatattttattgaaagtatgaggctgttcccttcactggaagttcctaggggacacagattgtcatttattcattgttatatcctyagcactgagcacacggtagttaaaaataaatttgaactgaacttgaaacttgaaaatcaatatccaatgttttaattttaaagtcttggcctgtctttta

SEQ ID NO: 22383 - DNA, 201 bp, Homo sapiens
gttgagcattttttcatacatttgttagccacttatatatatcttctttgagaactgtctattcatgtccctagcccacttttttatgggattttttttttgtcttactgattggcattctctatagattctgggtattagtcctgtgtcggatgtatagatggcaaagattttctcccactcttggggttttctgtttac

SEQ ID NO: 22384 - DNA, 201 bp, Homo sapiens
attgctagctcttatcttttttttctgtcatcttccttaatgtggtttatttaaaaaatttctttgactggtcctgtttcaaattgaatgattatgctgtwgaaaagatcagaaatggtcctggctctcatctttcttgggcaagccaatttttaaactaatctgtaaatttcattaaaccatgtgaacaaacagtaaaac

SEQ ID NO: 22385 - DNA, 201 bp, Homo sapiens
gctttcaaaagcataagctatcagagatagaatcagttggttctcctctaagttcctttttggggggtagaaactgaaatatgccatgctgtacgtagttstgaggattgaaagagttcttgcagtattttctcatataatcttagacacgtatcgtgatgtggatacgctattcctgtgtttttaaagggagagataaat

SEQ ID NO: 22386 - DNA, 201 bp, Homo sapiens
tgtttgtataataaaagaaaaggaaaacatttagccttaaagtaaaataagttggctctgttagcctctagagttcttaaaaataattataagtctcttcrgaatccctctaaatgtcttcatctcctttattgtctttatctgcttaaaactgcttctcttgaaagaccagaatgcaagatcaaaaaatcaaatattata

SEQ ID NO: 22387 - DNA, 201 bp, Homo sapiens
ggcctggctcaccctgccctggccatctgtccgcagaggccgcggggcccgtggggccggcgctggagccaccgacgctgccgctgcaccgcgcgctcacrctgcgcttcctgctccagcacctgggccgcgtggccagccgcgccccggccctgggtcccgcggtccgggccctgggcgccacctttgggccgctgctgc

SEQ ID NO: 22388 - DNA, 201 bp, Homo sapiens
tgaggcaggagaatcacttgaacggggaggtggagtttgcagtgagcagagattatgccaatgcagttcagcctgggcaacagagcaacactctgcctcaraaaagaaaagaaaaaaaaaatcgcccgctgtgcaacctaccatgctgggtggctgcggcagccctgtcctgggttcaaatcagttcaaatcctgccccca

SEQ ID NO: 22389 - DNA, 201 bp, Homo sapiens
acggccctagatacctccctgctctgagcctcagtttccccatctgtaacaggggtgatgaaaagcctgtttactggccgggcgcggtggctcacacctgtaatcccaacactttggaaggcagaggcgggaggactgcttcagcccaggagtttgggaccaacctgggcaacatagcaagaccccacctctattggaaaa

SEQ ID NO: 22390 - DNA, 201 bp, Homo sapiens
ctgtaatcccaacactttggaaggcagaggcgggaggactgcttcagcccaggagtttgggaccaacctgggcaacatagcaagaccccacctctattggaaaaaaaaaaaaaaaggctgggcaaggtggctcatgcctgtaatcccagcactttgggaggccaaggcgagcagatcacttgaggtcaggagttcaagacc

SEQ ID NO: 22391 - DNA, 201 bp, Homo sapiens
tgcaaaggtgagtctggcgcctctgccctgccccaccccaccctgatctggtgcagtacaagccagggagggaaggaagcagaaggaggccagccacttgraggcaaagagtagtctgttgaaatggactttgggcctggtgcgatggctcaggcctgtaatcccagcactttaggaggccgaggcgggtggatctcctga

SEQ ID NO: 22392 - DNA, 201 bp, Homo sapiens
cctataggaggatgtaaagaagaagagggtttggggggtggggttttgaaggctgaataggagttcatttggtgcagcaggcgttagaagaatgacactcygatagagggaccagcttgagcagtctccgtatcagagttgagatgtgcctttacccctcacgagggccttttggggagtcccaggaggtgctgagctgcg

SEQ ID NO: 22393 - DNA, 201 bp, Homo sapiens
tgcagtgggaggcagccacagtatacagtcggtgctcaggatgcatttgttttcctgtcccccagcgctgccgcctaaaccccccaaggcaaagccggccyccacagtcctggccaatggagggagcccaccctccctgcaggatgctgagtggtactggggggacatttcaaggtaggttgctggcagggggccagggac

SEQ ID NO: 22394 - DNA, 201 bp, Homo sapiens
ggagtttgggaccaacctgggcaacatagcaagaccccacctctattggaaaaaaaaaaaaaaaggctgggcaaggtggctcatgcctgtaatcccagcaytttgggaggccaaggcgagcagatcacttgaggtcaggagttcaagaccagcctggccaacatggtgaaacctcgtctctactaaaaatacaaaaattag

SEQ ID NO: 22395 - DNA, 201 bp, Homo sapiens
tcagaggctcagcctagcttcatcctgccttttgcagacagggtcccttgaagaacccctttggagaccctgatttccaaaatgaagccacaaggagggtrggatgtgggctgctcagctgaggccacacagcacagtgggatatgaggaccccacatccctcttcaaagacccttggccatcaccacttgccaggggtgt

SEQ ID NO: 22396 - DNA, 201 bp, Homo sapiens; identical to SEQ ID NO: 10163

SEQ ID NO: 22397 - DNA, 201 bp, Homo sapiens
tgctgtcatttcttcccgttgggggccgtaaatactgatccctgagtgctgccggcatcagcaggctggttgcagtgggaggcagccacagtatacagtcrgtgctcaggatgcatttgttttcctgtcccccagcgctgccgcctaaaccccccaaggcaaagccggcccccacagtcctggccaatggagggagcccac

SEQ ID NO: 22398 - DNA, 201 bp, Homo sapiens
gaggtggagtttgcagtgagcagagattatgccaatgcagttcagcctgggcaacagagcaacactctgcctcaaaaaagaaaagaaaaaaaaaatcgccygctgtgcaacctaccatgctgggtggctgcggcagccctgtcctgggttcaaatcagttcaaatcctgcccccacccaccaacctcctgaagacctcagc

SEQ ID NO: 22399 - DNA, 201 bp, Homo sapiens
actccataggcgttaacagaaacaaaaaaatgaggggtgtgggtcagggttccccagcagagctgggcgagccaccctgggttcaggctgccctgagccasgtcagctctgccctcttgtggcaaccggagatattgtacccagaaccctctctcctcagccagaccctgcctcccaccggacaggcccactgtgggctca

SEQ ID NO: 22400 - DNA, 201 bp, Homo sapiens
agaatgagtaggagttcaccagggaggaaaagttgtccaggcagctggggagcctcggaggctggcaggtgagtgaccagggccctccccgccaccgcccsccaccccagccagtacgcactcatggaggacgaggacgatctcccgcaccacgaggaacgcacttggtacgtgggcaagatcaaccgcacgcaggcagag

SEQ ID NO: 22401 - DNA, 201 bp, Homo sapiens
gacccaggccgggatatttttcttttctttcctttcaaccacttttttgtttgcatcaagaagggagaagcgggccgggcacagtggttcatgcctgtaaycccagcactttgggaggccaaggcgggtggatcacttgaggtcaggagttcaagaccagcctggccaacagggtaaaaccccatctctactaaaataata

SEQ ID NO: 22402 - DNA, 201 bp, Homo sapiens
cccaggagatggaggttgcagtgatccaagatcatgccactgcacaccagcctgggtgacagagcaagactccatctcaaaaaaaaaacaacaacaacaamaaaaaaaaaaaacgaggaggccaaggcaagtggatcgttaggggccaggagtttgaggctgcagtgagctaggattgcgccactgcactccaacctgggt

SEQ ID NO: 22403 - DNA, 201 bp, Homo sapiens
gttttgttttgttttgagatggagtttcgctcttgtcgcccaggctggagtgcaatggcgcaatcttggctcctgcaacctctgcctctcgggttcaagcsattctcctgcctcagcctcccgagtagctgggattacaggcacgtgccaccacgcctggctaatttttgtatttctagtagagacagggttttaccatgt

SEQ ID NO: 22404 - DNA, 201 bp, Homo sapiens; identical to SEQ ID NO: 10175

SEQ ID NO: 22405 - DNA, 201 bp, Homo sapiens
ccctcaggtgggggcctgtccctgcaaggataaccgggggtcacaggtcacagagaccgggagttcagaggggatagaacatgtgcggtttcaagaatggrgggccaggcacggtggcttacacctgtaatcccagcactttgggaggctgaggctggcagaacacctgaggtcaggagtttaaaaccagcctggccaaca

SEQ ID NO: 22406 - DNA, 201 bp, Homo sapiens
atcccagcactttgggaggctgaggctggcagaacacctgaggtcaggagtttaaaaccagcctggccaacatggtgaaaccccgtctctactaaaaaatwaaaaaaaaaaattagccaggcatggtgatggatgcctgtaatcccaactactcgggaggctgaggcaggagaattgcttgaacccgggaggtggaggttg

SEQ ID NO: 22407 - DNA, 201 bp, Homo sapiens
gccccagcctcacctgctgatggaggactcaatggcccagtgacctgacaccacaccaccaactccctcccaccagctgacgaatggtggacccagtgacragtggcccttgtaagggtcatggaataatttgaagcgaggcatgagcggcccctgtggtcgcctgtgactgctggagatagaggtcccagcaccccaagc

SEQ ID NO: 22408 - DNA, 201 bp, Homo sapiens
caggctgagcctggatgccctgggcctctatgttgaatagggcacagagtgactcctaagggaagatgggaaggtgaacatgaccaggccactgcatgtgytgtgccctctcccagttctccctccccacccctcccatgcccttatctctgggcagcaaagggagactgcaggggggttgagcggccagtccaggcctca

SEQ ID NO: 22409 - DNA, 201 bp, Homo sapiens
gatccctgagtgctgccggcatcagcaggctggttgcagtgggaggcagccacagtatacagtcggtgctcaggatgcatttgttttcctgtcccccagcrctgccgcctaaaccccccaaggcaaagccggcccccacagtcctggccaatggagggagcccaccctccctgcaggatgctgagtggtactggggggaca

SEQ ID NO: 22410 - DNA, 201 bp, Homo sapiens
gcttccagtaccgcgctctgtacccgttccgccgggagcggccggaggacctggagctgctgcccggcgacgtgctggtagtgagccgggcggccttgcakgcgctgggcgtggccgagggtggcgagcgctgcccacagagcgtgggctggatgcccggcctcaacgagcgcacacggcagcgaggtgacttccctggca

SEQ ID NO: 22411 - DNA, 201 bp, Homo sapiens
attccattttgtggaaagttggaagccttccacaaaaattcctgctgggctgggcgcaatggctcacacctgtaatcccagcactttgggaggctgaggcrggcagatggatcacttgaggccaggagttcaagaccagcctggccaacatggtgaaaccccgtctctactaaaaataaaaaatacaaaacccggccaggc

SEQ ID NO: 22412 - DNA, 201 bp, Homo sapiens
ggccgcggggcccgtggggccggcgctggagccaccgacgctgccgctgcaccgcgcgctcacgctgcgcttcctgctccagcacctgggccgcgtggccmgccgcgccccggccctgggtcccgcggtccgggccctgggcgccacctttgggccgctgctgctgcgcgcgccgccgccgccgtcctcgccgccgccagg

SEQ ID NO: 22413 - DNA, 201 bp, Homo sapiens
tctgcctcaaaaaagaaaagaaaaaaaaaatcgcccgctgtgcaacctaccatgctgggtggctgcggcagccctgtcctgggttcaaatcagttcaaatsctgcccccacccaccaacctcctgaagacctcagccagagcctccacctccctcttgggcctcagggagggcactgtcgcgtgccaggtgctgtgctaag

SEQ ID NO: 22414 - DNA, 201 bp, Homo sapiens
ggcgtcctcagctggccgagcatggtggcagcctgcacccttggctcccttgtctggtgcagccagcagagccgccagccttgggcgcccatggccctccrtgtgagggcgtgagcggcctgccccagcctcacctgctgatggaggactcaatggcccagtgacctgacaccacaccaccaactccctcccaccagctga

SEQ ID NO: 22415 - DNA, 201 bp, Homo sapiens; identical to SEQ ID NO: 10180

SEQ ID NO: 22416 - DNA, 201 bp, Homo sapiens
agggggtgctgaggtggtgcgacgctggccccagcctccaggcatctggtatctccagggcccaggcctgcgtcctgcctcggcctgaaggagcaggaggyggccccgtctgggctcccagccagaatctgcctctccccctggtaacagccacctccctcctctgcctggcctctgtccagccaccatacacggccccac

SEQ ID NO: 22417 - DNA, 201 bp, Homo sapiens
agctgacgaatggtggacccagtgacgagtggcccttgtaagggtcatggaataatttgaagcgaggcatgagcggcccctgtggtcgcctgtgactgctrgagatagaggtcccagcaccccaagccaacccagcggaccctcccagccctgcttcaaccaatggggccagtggggctccaagcagccacctaaccatcc

SEQ ID NO: 22418 - DNA, 201 bp, Homo sapiens
ccaaatgaagggaggccctgcctggaatggggcttcgaatagtaccgaggggcgcccaggcattgtgcggggcagaatggggtgcgggagggccgggggtygaacccacttccggtcccctagccgggtggccgggtccacgcagacccaagtgcgcgtctgtgtgagcgctcaggccctgccttcacccgcggagccccc

SEQ ID NO: 22419 - DNA, 201 bp, Homo sapiens
ggcctcttggtggatagcacctatccttatagccaccctgaatccttgacaagcaacttaacccactgccaaggctttgcatgtgccgttccgtctgcctrtcgcgccttcctatccgctgtgatgatccattctctagaacagcacgtccatcccccgaccctagccctgtccatcacagggcgtctgaacccgcagggc

SEQ ID NO: 22420 - DNA, 201 bp, Homo sapiens
cctcagtttccccatctgtaacaggggtgatgaaaagcctgtttactggccgggcgcggtggctcacacctgtaatcccaacactttggaaggcagaggcrggaggactgcttcagcccaggagtttgggaccaacctgggcaacatagcaagaccccacctctattggaaaaaaaaaaaaaaaggctgggcaaggtggct

SEQ ID NO: 22421 - DNA, 201 bp, Homo sapiens
gatgaaaagcctgtttactggccgggcgcggtggctcacacctgtaatcccaacactttggaaggcagaggcgggaggactgcttcagcccaggagtttgsgaccaacctgggcaacatagcaagaccccacctctattggaaaaaaaaaaaaaaaggctgggcaaggtggctcatgcctgtaatcccagcactttgggag

SEQ ID NO: 22422 - DNA, 201 bp, Homo sapiens
ggtggtagtgtaaattagtttggccattgtggaagacagtgtgatgattcctcaaggatctagaaccagaaataccatttgacccagcaatctcattactytgtgtatacccaaaggattataaatcattcttctataaagacacatggacatgtatgtttattgaagcactgtttacaatagcaaagtcttggaactacc

SEQ ID NO: 22423 - DNA, 201 bp, Homo sapiens
gtttcaattatagcctaccactaaatagctctgtgtaaccttctatgagttttgtaacctctgtgtgacagtttcctcatttataaaatgtatatacttgwgatacacgtgatgaggattaaatgaggtaatacatctgaagtgctgccacttcctatgaactgagcacgtgtaagcagttgtcatcagtttgcagttgct

SEQ ID NO: 22424 - DNA, 201 bp, Homo sapiens
gacagtcgtaatgacgtcttaagatatttttcaatataagagctttatttttactgaaataaatgttcccatttcagcttcaatggactacagacagtggraatattctcaaagagaccatgacagttacatttgcagaaggtaggttttcttgaatacctttaaaatataaattcaaatggtgtttaactggaaggaact

SEQ ID NO: 22425 - DNA, 201 bp, Homo sapiens
cagtatattgctattaactgtagtcactatgaacttattcctcgtaattgaaattttgtatcctttgaccacagtctgcttttcttttctttcctttcttttcttttcttttctttttttaaatttacacaccactatacaaacagggaacacagctttctttcctaatatgagggtttaaagaaggagtgtccaatcttt

SEQ ID NO: 22426 - DNA, 201 bp, Homo sapiens
atacaattatttctaccacttttatatcctggctgttcaatataaattctaaaaattataaaattacagtagtcagtattataatttaaagtaaacaagtrtcagagaaattctcaataaagcattattcctttactctcaataaagcataaattttctttacctattacaaatacataagttttagttaggtatattctt

SEQ ID NO: 22427 - DNA, 201 bp, Homo sapiens
agtatattgctattaactgtagtcactatgaacttattcctcgtaattgaaattttgtatcctttgaccacagtctgcttttcttttctttcctttcttttcttttcttttctttttttaaatttacacaccactatacaaacagggaacacagctttctttcctaatatgagggtttaaagaaggagtgtccaatctttt

SEQ ID NO: 22428 - DNA, 201 bp, Homo sapiens
tatattgctattaactgtagtcactatgaacttattcctcgtaattgaaattttgtatcctttgaccacagtctgcttttcttttctttcctttcttttcttttcttttctttttttaaatttacacaccactatacaaacagggaacacagctttctttcctaatatgagggtttaaagaaggagtgtccaatcttttgg

SEQ ID NO: 22429 - DNA, 201 bp, Homo sapiens
ccaaaccacaagtatttttctattgatcatcatttaggttgtttccaacttttcattattacaaagaatgctgtagtcaaacctccacactatatatactytaatgaaaagctgtaattagtttttctagagtatatgccttaaagtagaattgctggttgtgaattatgcccatttcatctttacaagattatcttaaaa

SEQ ID NO: 22430 - DNA, 201 bp, Homo sapiens
gctaggctggtctcaaactcctgacctcaggtgatccacctgcctcagcctcccaaagtgcagggattataggtgtgagccgttgcacccagccaactgtaaaaaaaaaaaaaaaatgttttaattgtagtagttgtagatatttatggggtacatgaaatgttttgatactgacatgcaatgtataataatcatagcatg

SEQ ID NO: 22431 - DNA, 201 bp, Homo sapiens
gctgaggcagagaattgcttgaacccgggaggcggaggttgcagtgagctgagattgcaccactgcactccagcctgggtgacagagcgagacatcatttaaaaaaaaaaaaaaaaagactgggcacagtggcttatacctgtaatcccaacactttagaatgccaaggcaggcggatcacgaggtcaggagattgagacc

SEQ ID NO: 22432 - DNA, 201 bp, Homo sapiens
gcatatttatatatattcctctcctatcccagaatgctggaagaaccccttctggggcctcttcagccactttcttctaatacacctatatgggcctgccrtcttaggagctgtgaggtgagttataaataatcattacctagaattacttaactgattataaccacaggtcatccccaaatgccacttttgagtacaact

SEQ ID NO: 22433 - DNA, 201 bp, Homo sapiens
tgcagtgagccgagattgtgccactgtactccagcctgggtgacagagcgagacgctgtctcgaaaaaaaaaaaaaattcattatagttcctaaatttttwaatttgttttatcacatttttatgcatagaattcctctgtggcaaaatgtttaaaatgctttttgctaacttttatttcagtttttgtttttgttttaaa

SEQ ID NO: 22434 - DNA, 201 bp, Homo sapiens
tttaatttcctcttatactttgtttttaatgcttttttatgactgacattttgaagctgataactagcacagttaactgtagctaattcactaagtctggytaattccagtagtaataaccctaagatgccctgatctgggaactatggtccattttttacggttgctttttctcatgtgttcttactgctgggccctttc

SEQ ID NO: 22435 - DNA, 201 bp, Homo sapiens
acttaatacactttattatatatttagtactttgttttagctacttactatgagcagaaacttcagccgcctgtcatttttttaaaactaatctttgattmcttacggcagccagaaatgaattccaagccgtaaataaaattccatttcacaccttttatgctttaggttttaaatgtgaaatattagcattctttttta

SEQ ID NO: 22436 - DNA, 201 bp, Homo sapiens
cagcagtgtgtgaaaatttcatttccccacttttacttcatgacttagcattgccagatgtttaaaaatctttgtttgtttgtttgtttgtttttttgagwcggggtctcactctgtcacccaggctggagtacagtggtgtgatctcagctcactgcaatctcaatctccttggctcaagagatcctcctgcctcagctt

SEQ ID NO: 22437 - DNA, 201 bp, Homo sapiens
ctgagggagggtctactttcagattcactcttgtggctgtcagcaggccttattccttgccacgtgggcctttccacagagctcccttaccacttggcagmtgattacctccagagagagcaattcaagcaagagtaagagagagtacccaaatgatagttacagtctttttgcagcctaatatcaaaaattacttcctac

SEQ ID NO: 22438 - DNA, 201 bp, Homo sapiens
aaaatttctcataaaaaaccttgtgctatatatattacatttgttaggacattattgttgttgcttttctaagtagagtacatgtatgtatatacatatakgtgtgtgtgtgtgtgtgtgtgtgtgtgtgtgtgtagttttagctttttgtccccctaccttttgttagtcatggtttttcagtggtttcctaaagttact

SEQ ID NO: 22439 - DNA, 201 bp, Homo sapiens
agacaaaactctgtctactaaaaatacaaaaattagcctggcgtggtggcacacgcctatagtcccagctacttgggaggctgaggcaggagaactgcttraacccaggaggtggaggttgcagtgagccaagattgcgccactgtgctccagcctgggtgacagagtgagactccgtctcaaaaaaaaaaaaattatatg

SEQ ID NO: 22440 - DNA, 201 bp, Homo sapiens
ctgaggcaggagaatcgcttgaacccaggaggtggaggttgcagtgagctgagatcataccactgtactccagcctggtgacagagggagactccgtctcaaaaaaaaaaaaaaaaaaaaaattgggttaatggctgaggaaatattttctgcattttggttcaaaatattgtttagtaatcttttattttttgaatttct

SEQ ID NO: 22441 - DNA, 201 bp, Homo sapiens
ttgctagggcaaaggctgtatcttttaaaaatgttgacaaatattgcaaagttgctttttagagcgattttatcaatttagcagcaaattatgagaccaaygtagtaagttttagatagattaggactacagagtagtcattgctcttggtaagaatgaaaaatgtgaaccaatgaaagattttacaatgtcctttatgaa

SEQ ID NO: 22442 - DNA, 201 bp, Homo sapiens
gctgaggcaggagaatggcgtgaacccaggaggcggagcttgcagtgagccgagatcatgccactgcactccagcctgggcgacagcgagactccgtctcaaaaaaaaaaaaaaaaaattgctctcaaaagtgattgtacaggtccagaatccctttgaatttttttggaccaggtatatttcagaattctgaattttttg

SEQ ID NO: 22443 - DNA, 201 bp, Homo sapiens
aaaataaataaataaataaataaataaataaataaataaataagtaatccaggcatgaggtgattatgccttccaggagaatgaagagaaggcaaatctasgggaaaaaaatagtaaaatctgtaagtacttagatatttttaaataatgtttacttttaatttgctaagtattaatacaactgagaatatggcatatatt

SEQ ID NO: 22444 - DNA, 201 bp, Homo sapiens
gaggcaggagaatcactggaatctgggaggtggaggttgtggtgagctgagatcatgccattgcactccagcctgggcaacaagagcaaaactccatctcaaaaaataaataaataaataaataaataaataaataaataaataagtaatccaggcatgaggtgattatgccttccaggagaatgaagagaaggcaaatct

SEQ ID NO: 22445 - DNA, 201 bp, Homo sapiens
aggcaggagaatcactggaatctgggaggtggaggttgtggtgagctgagatcatgccattgcactccagcctgggcaacaagagcaaaactccatctcaaaaaataaataaataaataaataaataaataaataaataaataagtaatccaggcatgaggtgattatgccttccaggagaatgaagagaaggcaaatcta

SEQ ID NO: 22446 - DNA, 201 bp, Homo sapiens
ggcaggagaatcactggaatctgggaggtggaggttgtggtgagctgagatcatgccattgcactccagcctgggcaacaagagcaaaactccatctcaaaaaataaataaataaataaataaataaataaataaataaataagtaatccaggcatgaggtgattatgccttccaggagaatgaagagaaggcaaatctag

SEQ ID NO: 22447 - DNA, 201 bp, Homo sapiens
ttttttccaactgtaaatgatataaaaaatcacatccatgaggtacagaaatccttgagaaatggagatacggtatataactcagagattattccagcaayggtatgattacaaccataattccttattacagagtctttctcagcttctattaatatttagtctaataagaatggctagtgttaggccatctgaataact

SEQ ID NO: 22448 - DNA, 201 bp, Homo sapiens
ggagaatcactggaatctgggaggtggaggttgtggtgagctgagatcatgccattgcactccagcctgggcaacaagagcaaaactccatctcaaaaaataaataaataaataaataaataaataaataaataaataagtaatccaggcatgaggtgattatgccttccaggagaatgaagagaaggcaaatctagggga

SEQ ID NO: 22449 - DNA, 201 bp, Homo sapiens
tagtttccatgcagcttcttcagctgcattcaacgtcagcaataactgggtgctcattctaattttaattaataacgtcaccaataactgggtgctcattytaattttctccccaaagggaagacttaaccaagatgtcaggtctgaatagactacaagtagctacaggagcgctgggttccaggtactggcacagggtct

SEQ ID NO: 22450 - DNA, 201 bp, Homo sapiens
aaaatcatcctcccacaccttctccccgactttttgccttttttgtcttgaagttacccaaaggcctgtgtattgttctcaatggtcccaagaattactckaatatagttgtttttctgagggaggatggatggagataactatcctgatcccaatgtcactttttaaggcattcgcttcaagagacaagcagtttagaat

SEQ ID NO: 22451 - DNA, 201 bp, Homo sapiens
attcttatggtcttattcaagatattgatgttactttgttcttgtttttgttgttaagatgtccctgaagagaaacccagtaacagaaacttaccaactgyaagagtggatactctagcagacaataccagcaattacattcttcatcctcaaacatccttcccattgcccaaaaagtcagtgaccgggtgagtccacggg

SEQ ID NO: 22452 - DNA, 201 bp, Homo sapiens
ccctcaactgtaggaccacagtgaaagtctataaatatttacaaatattttaatttaattggatataaagcaaatcttagaagagttaagagatcattttwaattttatttgatatgaaataaccatatataattttttcttaaaggattaatcctttcctttatgagtattaacctaagtaattatgattcctactttgg

SEQ ID NO: 22453 - DNA, 201 bp, Homo sapiens
ttggctccctgcgacctgtgcttcccaggttcaagcgattctcctgcctcaacctccccagtagctaggactataggtgcgcaccaccacacctagctaayttttttgtatttttagtagagatggggtttcaccacgttggccaggatggtctcaatctcttaacttcgtgatctgcccaccttggcctcccaaagtgct

SEQ ID NO: 22454 - DNA, 201 bp, Homo sapiens
gggctacaaaaggtgaattaagtttggtgttaattgagaagctccttagatttcacacttctagagaagtttagtatagtccagcattatagtacggagamcacactagattcgagttacagatatagcgtctttcaagtatatatatatatatatatatatatatatatatatatatatatatatatatagttgtgcctc

SEQ ID NO: 22455 - DNA, 201 bp, Homo sapiens
agctccttagatttcacacttctagagaagtttagtatagtccagcattatagtacggagaccacactagattcgagttacagatatagcgtctttcaagwatatatatatatatatatatatatatatatatatatatatatatatatatagttgtgcctctgtatctatgggttctgtatccatggcttcaacaaactg

SEQ ID NO: 22456 - DNA, 201 bp, Homo sapiens
tttagtagagacagggtttcaccatgttggccagtctggtctcaaactcctgaccacaagcgatccacctacctgggcctcccagaatgctgagattaccrgcatgagccactgtgcccagcctgtttttttaaaaaattaaacttttgatagtttttattatttgcttatctctgtggttcatttttttagacattgaat

SEQ ID NO: 22457 - DNA, 201 bp, Homo sapiens
tgtattataggtaatccagagaggatttaaagtttgtgggaggatatgcttagattttatgcaaatacgatgccattttatatcaggaactgagcatctgyagatttttatttctgatggaggtcctggaaccagtcttccatggatatggagggacaatcccattctagatctaccgaattaaaattaatggaggttaaa

SEQ ID NO: 22458 - DNA, 201 bp, Homo sapiens
gattcatagtaattttgtacatattataaaaggaatgttatgtcatttacctctaaaagatgcggtaaattttactttctaaagtacttttgagcaatattttatttatttatttatttatttatttatttatttttgagacagagtctcactctgtcgccaggctgtagtgccgtggcacaatcttggctccctgcgacc

SEQ ID NO: 22459 - DNA, 201 bp, Homo sapiens
attcatagtaattttgtacatattataaaaggaatgttatgtcatttacctctaaaagatgcggtaaattttactttctaaagtacttttgagcaatattttatttatttatttatttatttatttatttatttttgagacagagtctcactctgtcgccaggctgtagtgccgtggcacaatcttggctccctgcgacct

SEQ ID NO: 22460 - DNA, 201 bp, Homo sapiens
ttcatagtaattttgtacatattataaaaggaatgttatgtcatttacctctaaaagatgcggtaaattttactttctaaagtacttttgagcaatattttatttatttatttatttatttatttatttatttttgagacagagtctcactctgtcgccaggctgtagtgccgtggcacaatcttggctccctgcgacctg

SEQ ID NO: 22461 - DNA, 201 bp, Homo sapiens
tcatagtaattttgtacatattataaaaggaatgttatgtcatttacctctaaaagatgcggtaaattttactttctaaagtacttttgagcaatattttatttatttatttatttatttatttatttatttttgagacagagtctcactctgtcgccaggctgtagtgccgtggcacaatcttggctccctgcgacctgt

SEQ ID NO: 22462 - DNA, 201 bp, Homo sapiens
ggaagcaaaaaaaactgtggactataagaaattatctgctacataaattattgaagcttttcagaatttacaactctggtgacttctgatgtcttagaaargaaggtgaatatagtcaaagcgtggcattgagataattggactgaagaccagtttgatgagaagcttttatttaaaactgatatatttgttgccagttcc

SEQ ID NO: 22463 - DNA, 201 bp, Homo sapiens
ggtttcaccatgttgtctaggctggtctcaaactcctgacctcaggcagtcctccagcctcagcctcccaaaatgtggggattacaggtgtgagccatcacgcctggcctgtatatcttcttttgagagatgtctgttcagctcatttgtccatttctaaatgaaattatttatttattaatccctcgtggaatagtttgc

SEQ ID NO: 22464 - DNA, 201 bp, Homo sapiens
ttaaaccatgagaaacccccaccatgatccaatcacctcccaccaggccccacctccaacattgggggttataattgaacatgagatttgggtggggacayggacccagaccatatcagagtctcacaaacctgttatggcacctgagttttggggtacaggttagcactctgtggcagagttggatgtagattgaccaca

SEQ ID NO: 22465 - DNA, 201 bp, Homo sapiens
gatgtgacgtgactacagtatattgctattaactgtagtcactatgaacttattcctcgtaattgaaattttgtatcctttgaccacagtctgcttttcttttctttcctttcttttcttttcttttctttttttaaatttacacaccactatacaaacagggaacacagctttctttcctaatatgagggtttaaagaag

SEQ ID NO: 22466 - DNA, 201 bp, Homo sapiens
atgtgacgtgactacagtatattgctattaactgtagtcactatgaacttattcctcgtaattgaaattttgtatcctttgaccacagtctgcttttcttttctttcctttcttttcttttcttttctttttttaaatttacacaccactatacaaacagggaacacagctttctttcctaatatgagggtttaaagaagg

SEQ ID NO: 22467 - DNA, 201 bp, Homo sapiens
tgtgacgtgactacagtatattgctattaactgtagtcactatgaacttattcctcgtaattgaaattttgtatcctttgaccacagtctgcttttcttttctttcctttcttttcttttcttttctttttttaaatttacacaccactatacaaacagggaacacagctttctttcctaatatgagggtttaaagaagga

SEQ ID NO: 22468 - DNA, 201 bp, Homo sapiens
gtgacgtgactacagtatattgctattaactgtagtcactatgaacttattcctcgtaattgaaattttgtatcctttgaccacagtctgcttttcttttctttcctttcttttcttttcttttctttttttaaatttacacaccactatacaaacagggaacacagctttctttcctaatatgagggtttaaagaaggag

SEQ ID NO: 22469 - DNA, 201 bp, Homo sapiens
cagttatataataagagcacaaaataagctttgggagagatatatgaaacacttaaagttgttgggactacgtgtatctggaagaagaaatttaggtcttygacttagcagttaataaaatagcagtggttaaagaaaataataactaatgcacccatcagatcaatctgtagttattgttaaaatttgttattgatgact

SEQ ID NO: 22470 - DNA, 201 bp, Homo sapiens
tggcgggcgcctatagtcccagctactctggaggctgaggcaggagaatggtgtgaacctgggaggcggagcttgcagtgagccgagagcttgcagtgagygccactgcactccagtactgggtgatagagcaagactccgtctcaaaacaaaacaaaacaaaaaaaacaaaaaaaaactttactttgacggagttaattg

SEQ ID NO: 22471 - DNA, 201 bp, Homo sapiens
gttagttaattagcaaacatgagttcacttaaaatgttcagttcctctgtgatatcatgaaataaacctgattttaaaaattcagatatagttataaaacrcacagaatataaattttatacatagagactttaagtgtcttgatcatccttgtatctccagcacatagaacagtcacttggatgtgtagtaataattcat

SEQ ID NO: 22472 - DNA, 201 bp, Homo sapiens
tggggtctcactatgttgtccaggttgcctggggtcaagcttgacctcccaaaatgctaggattacaggcatgagcaaccgcactctgtcctagctgtacytttgtaaccatcaaccatttggctgttcccttccctaccctacccttccccacctctagtaaccattattctactccctacttctatgaaatcaaccttt

SEQ ID NO: 22473 - DNA, 201 bp, Homo sapiens
gctcaagggatagctgttatatttagtgtattcaagaattttgagctgggcgtggtggctgacacctgtgatcccagcactttgggaggctgaggcgggcrtatcacctgaggtcaggagttcaagaccagcctggccaacatggtgaaaccctgtctctactaaaaatacaaaaattagctgggcgtggtggtgggtgcc

SEQ ID NO: 22474 - DNA, 201 bp, Homo sapiens
tttttcataatggctgtactaatttacaccaacagtgtatgagttcccttttctccaaatccttgccagcatttgttattttttgtctttttgataatagmcattctaaccgaggtgagatgatagctcattgtgattttgatttgtatttacccgattcttagagattttttttaaagatatatacccgttgaccattcg

SEQ ID NO: 22475 - DNA, 201 bp, Homo sapiens
tttcaatataagagctttatttttactgaaataaatgttcccatttcagcttcaatggactacagacagtgggaatattctcaaagagaccatgacagttmcatttgcagaaggtaggttttcttgaatacctttaaaatataaattcaaatggtgtttaactggaaggaacttaagatattatctcatctaatcaaattt

SEQ ID NO: 22476 - DNA, 201 bp, Homo sapiens
tctggaagaagaaatttaggtctttgacttagcagttaataaaatagcagtggttaaagaaaataataactaatgcacccatcagatcaatctgtagttaytgttaaaatttgttattgatgacttcaatatttgtctttgatactaagaggataaagcagttgaatgcattttgtgtgttcattgaactgcatatttata

SEQ ID NO: 22477 - DNA, 201 bp, Homo sapiens
cttatagaaaatataatcaattactttataatattgcattttaatatatcaatgaataaataagacttctttcatatattatactgaaaaataaaatatcraagtttccattaaacctatttaataaaatgttaaaagagcaattttattttaaatatgtacatcagctgtgtttttccccttcagattaaatattttagc

SEQ ID NO: 22478 - DNA, 201 bp, Homo sapiens
aagaattagtatcacagggaatagaacaagtgtatgcagtaaggaaacagctaaggtacaatagaagagcattgttcttttacatttttcagttttgtttsttgctttaaataatacagtgaacattggagatattttccaaaatatatgctatcagggtagataaggaatatagtttattaatttattaaaataatctta

SEQ ID NO: 22479 - DNA, 201 bp, Homo sapiens
tacaaaagcatctaatctgtatggactccagggattcttcctttggacaaaatgattctcctacagttttgcccatcactactcgtgaagcaaataattcactcatatcacagaatataccagggcccctgactcagacacagactctttctgcagagcaattccatctagtggaccaaaatgggcaggctattcaatatg

SEQ ID NO: 22480 - DNA, 201 bp, Homo sapiens
tttatatgtttgtatatgtaagtaagacttactaatgttttctttccttaaagctgtatatttgaaagattttgacattgccaccaccaagttacttttawtctagtgtctagaatagatggacacttgaattaatatcaatagttggttttggcccacagggagtagagctgtggtaatggagtgtcagtatgggccaag

SEQ ID NO: 22481 - DNA, 201 bp, Homo sapiens
atagcccaaggtaactacaggctttttggaatttttgcaattgattttttacttgattaggatataagtgataatttaaaatcttaaaaacgagaagcaaytaaaagatattttgtagccatatattaaaaatggactgattttgtagctttacaaaattgccccaattgagaactactgtagtagacctaagtggctcgg

SEQ ID NO: 22482 - DNA, 201 bp, Homo sapiens
cgtgactacagtatattgctattaactgtagtcactatgaacttattcctcgtaattgaaattttgtatcctttgaccacagtctgcttttcttttctttcctttcttttcttttcttttctttttttaaatttacacaccactatacaaacagggaacacagctttctttcctaatatgagggtttaaagaaggagtgtc

SEQ ID NO: 22483 - DNA, 201 bp, Homo sapiens
actgattttgtagctttacaaaattgccccaattgagaactactgtagtagacctaagtggctcggagttattggtatatatttcttcattttcttttttwaaatatatcttccttttcaaagcttgtcaaactaatgttaagtgggatgcttgtctattaatggtaaaaattgtatatatataatctctgtctacaccag

SEQ ID NO: 22484 - DNA, 201 bp, Homo sapiens
tacagtatattgctattaactgtagtcactatgaacttattcctcgtaattgaaattttgtatcctttgaccacagtctgcttttcttttctttcctttcttttcttttcttttctttttttaaatttacacaccactatacaaacagggaacacagctttctttcctaatatgagggtttaaagaaggagtgtccaatct

SEQ ID NO: 22485 - DNA, 201 bp, Homo sapiens
acagtatattgctattaactgtagtcactatgaacttattcctcgtaattgaaattttgtatcctttgaccacagtctgcttttcttttctttcctttcttttcttttcttttctttttttaaatttacacaccactatacaaacagggaacacagctttctttcctaatatgagggtttaaagaaggagtgtccaatctt

SEQ ID NO: 22486 - DNA, 201 bp, Homo sapiens
ttggaaaatgctgccagtccgcaggaaaaagttgttactgctgctgtctgtgaccaagaggacactttatttcttgaaacaactgggggcaaactggctcycagataaggcttcagtccctactcatgtgaggaaaccagccctggtaggttccatgcacaagaatacaggacaaggagcagcttttttcacctcatgcaa

SEQ ID NO: 22487 - DNA, 201 bp, Homo sapiens
tatattctgactagaaataacaccattttctctttgcagcacctgagagtttattcagtgacgataatactcacaagaccctttttggatttgtggcccamcccacaagttatagttccttctctgaatatttcatccagattgtgaagagcagcttctggcagccacagttgtactatgtgacccctacttcccatgccc

SEQ ID NO: 22488 - DNA, 201 bp, Homo sapiens
gtgtttcatggaacctggaggttccttagagacccctcagaagcagacctagtggtcagagtaaaagctgaggagtaagctgtgcctctccctccccaggmcccatcccaaccacagaagttccacttgcatcagttttatataccagactattgcatgaaattacattttgacagatgattattcttaaaaaatatataa

SEQ ID NO: 22489 - DNA, 201 bp, Homo sapiens
atttgcataggactatgccttgattccttagagtatcattgtgagatggttgtatattctgactagaaataacaccattttctctttgcagcacctgagartttattcagtgacgataatactcacaagaccctttttggatttgtggcccaacccacaagttatagttccttctctgaatatttcatccagattgtgaag

SEQ ID NO: 22490 - DNA, 201 bp, Homo sapiens
aaatctttcctggctttaagagatatggggatagaaaagtttaatccctttttgattcttgatgtagcaaaaatgctaaattaatggagtcctaattcatyagtctttactaaattttattctgaatcatggaaatcagtttcttttaagaaggaagatttcctttggaagcttttgttggagtggaggaggtgaaaagag

SEQ ID NO: 22491 - DNA, 201 bp, Homo sapiens
tgtgaactactaaaagtaaatctgcatggacttcttgcctggtgagttacacagaaaatgaaagtgattatcagtggctgtggcaagatgaaaggaaccaygccaggacttctgagggaaggtaagattttgttatttatttcaagaaattgaaaagttgagagaaatgcacccagccatccccctatgcattcattcatc

SEQ ID NO: 22492 - DNA, 201 bp, Homo sapiens
aatttttgacgatgaaatttgaattaatggtatgtggctttatgtagcaagctaactggaaggaacacaagcaaaacagtctatattttatgcactattayttaagggaatgtaattatatttatttttaattatatttattttatgttcatgtagtaactaaaattcatatttattcctcttctctccacttcatacaaa

SEQ ID NO: 22493 - DNA, 201 bp, Homo sapiens
tcctcttgcattttcaggaagagtgtttgggactgaaaaatccttgtctggatctagtcctcagccactcagaagctggcatgccatgactcaaagagccrcccgtctggaatgaagacagtgacccgtaactcccacctgaagagcaggtgcttggaaaatgctgccagtccgcaggaaaaagttgttactgctgctgtc

SEQ ID NO: 22494 - DNA, 201 bp, Homo sapiens
tgaacatagatcagatgaaggggctgggggaagatagcagacatgaggttacaggtatggggactacaaggtgtaagctatgccagggagtttgaacttgrccctgtaggaaataaggaggcaacgtacttagttaaaattattatcattgttatgttaaaatatgcataacataaaatttaccatttcacccatttaaaa

SEQ ID NO: 22495 - DNA, 201 bp, Homo sapiens
tgggatgtgggaaactggaaaggaaacttgaattgatttgagttgacacgagattacactatttgggaagaatccagaattcaatcagcagccttggaccragaaagtccaggtctgagcattggctttcccccttatcagaggatgacttaacctctgggagtttcggtaatcccagccacaaaacaagggtaatcagac

SEQ ID NO: 22496 - DNA, 201 bp, Homo sapiens
ctcctcttgcattttcaggaagagtgtttgggactgaaaaatccttgtctggatctagtcctcagccactcagaagctggcatgccatgactcaaagagcygcccgtctggaatgaagacagtgacccgtaactcccacctgaagagcaggtgcttggaaaatgctgccagtccgcaggaaaaagttgttactgctgctgt

SEQ ID NO: 22497 - DNA, 201 bp, Homo sapiens
agagtattgctaaggtagagaatggagaatgttgactctcacagccctctgacaaattagaatcctagaataagacaactttaaatgtgtagactcggacygtggctattcaatggacaattttagatttgcataggactatgccttgattccttagagtatcattgtgagatggttgtatattctgactagaaataacac

SEQ ID NO: 22498 - DNA, 201 bp, Homo sapiens
cagtgacatcctatttggggtgactggttcagggagacttgagtgcaaacagagcattactcactctggcagactagggttctttgctgaaatattggggmctgatggcttctgactggtagtaataaatcctgttcctctcgagcaaagaaaagccaaatctaaaccaaatgtgagcaggagtgtgaaatggaaagctgg

SEQ ID NO: 22499 - DNA, 201 bp, Homo sapiens
tggacaattttagatttgcataggactatgccttgattccttagagtatcattgtgagatggttgtatattctgactagaaataacaccattttctctttrcagcacctgagagtttattcagtgacgataatactcacaagaccctttttggatttgtggcccaacccacaagttatagttccttctctgaatatttcat

SEQ ID NO: 22500 - DNA, 201 bp, Homo sapiens
cgacctctgcgccctcgggagtccgggtcctcacgcgcatcccgagccctgggggcctggatgcggcccacggccccgactcaagggcgaggctcaggggrgagggcgcaagacgcctccgcacagaactgtgaccgaggagcaggggggctgccggggagggcgcacctgtccccgtgcacgcgctgtggcctccgtgga

SEQ ID NO: 22501 - DNA, 201 bp, Homo sapiens
acatcacagctgggtgggggctgggtgttgggtccaaggaggtggctgtccaaggtcacacagcctgtgggtcctgggctgccaccagggggtctcccaamatccccattccgtcacccatctgtccttcatgcccgtgatggcagctttatcccaggtcccagcagaagccgcggctgcaggggcagttaggcaggcagg

SEQ ID NO: 22502 - DNA, 201 bp, Homo sapiens
cggtggcgggcggggctgagcggcggcggagcacgcggaggggcgtgagaggccgagaggcggtccctcggctggggcatagaggcttccccggtggaaawgagccgcggcctctgcgggtgaggggcccgaccggccagccagctcgccagggtggaaagggaccccccacgggtcctgcggcctcgagtctggggggct

SEQ ID NO: 22503 - DNA, 201 bp, Homo sapiens
ctactcagattttctccccaactgttctctcattttgataagagggatcccagacagactctggaagcgccgttttgcgggtgggaactgaagggaaaagkcctctctctgagcctgtgtttcgggccagcttttcctgaaggagggtctgattcccaccaggtccccagggccctggccggtgggggcaggcctggctga

SEQ ID NO: 22504 - DNA, 201 bp, Homo sapiens
atggatgagttttggtgacacaggcttagtggtagtggaggggggcaggcagaagagataaggggtggctgccctggagccttgatggggtgagagacccyggggtccagggcaaaggggtcactcctcggccgggctgctctatctccagatcccctcacccggcacatggccaggcacctggggcagtgtcagctgaat

SEQ ID NO: 22505 - DNA, 201 bp, Homo sapiens
cgcgcgcggcgcacagtgaccaggtgagcacgcgccgcccagggacccccgcctgctcctcggactgctctccctgcccgctgatccttcccgccgctctmgaagcgctggttctcccagcaggccccttctctgggttttcctgtctccttctccccccgccgcccccccaacacttcatcagggagacacctgacaccg

SEQ ID NO: 22506 - DNA, 201 bp, Homo sapiens
ggtgcagatgggggacggcctcccccggggctccccccacaacagcgcaggtgagtcggtggcgggcggggctgagcggcggcggagcacgcggaggggcstgagaggccgagaggcggtccctcggctggggcatagaggcttccccggtggaaatgagccgcggcctctgcgggtgaggggcccgaccggccagccagc

SEQ ID NO: 22507 - DNA, 201 bp, Homo sapiens
gctagccccagacatgcacactcttgctgtcacccaaacacgcgcagacacccgcacactcgagctgccagcattgggagctgggggcggggcgggtgccyttcaggagcagggactcggctcctctgcccgccccgcggggcttgctgcagatgccaggggttattttaagcctggatcaatggatgagttttggtgaca

SEQ ID NO: 22508 - DNA, 201 bp, Homo sapiens
cctaaggaaaggaagcaggaaaggacgctccagaaagtagagctcagaagctctgagaagaatcacaaatgagaaggtttttttttgtttttttttttttktttgtttgtttgtttttttaagacggagtctcaatctgtttcccaggctggagggcaatggtgtgatctcagctcactgcaaactctgcctcccaggttc

SEQ ID NO: 22509 - DNA, 201 bp, Homo sapiens
aggtgtggtggcaggcaccttataatcccagctactagggaagctgaggctggagaatcacttgaaccggggaggtggaggttgcagtgagccaagattgygccattgcactccagcctggacaacagagcgagactctgcttcaaaagataaaaaaattaaaaaaaaggattcctggaggaggccgctgatggggtctga

SEQ ID NO: 22510 - DNA, 201 bp, Homo sapiens
ccctaaggaaaggaagcaggaaaggacgctccagaaagtagagctcagaagctctgagaagaatcacaaatgagaaggtttttttttgtttttttttttttgtttgtttgtttgtttttttaagacggagtctcaatctgtttcccaggctggagggcaatggtgtgatctcagctcactgcaaactctgcctcccaggtt

SEQ ID NO: 22511 - DNA, 201 bp, Homo sapiens
gctggaaaggggttccaggaagagagggcagcctgcgtgaccagacagggggcaaatgagcctgggtcaggtgttggcaagggccctgtcgtggggtaggrgtgcctcccgggtgtgctgaactggccagaatgtggattcgggactcatagtgcaggttccaggccagaccctgcccttcctggctgtgtgccagtcaca

SEQ ID NO: 22512 - DNA, 201 bp, Homo sapiens; identical to SEQ ID NO: 8690

SEQ ID NO: 22513 - DNA, 201 bp, Homo sapiens; identical to SEQ ID NO: 8693

SEQ ID NO: 22514 - DNA, 201 bp, Homo sapiens; identical to SEQ ID NO: 8697

SEQ ID NO: 22515 - DNA, 201 bp, Homo sapiens; identical to SEQ ID NO: 8273

SEQ ID NO: 22516 - DNA, 201 bp, Homo sapiens; identical to SEQ ID NO: 8703

SEQ ID NO: 22517 - DNA, 201 bp, Homo sapiens; identical to SEQ ID NO: 8705

SEQ ID NO: 22518 - DNA, 201 bp, Homo sapiens; identical to SEQ ID NO: 9885

SEQ ID NO: 22519 - DNA, 201 bp, Homo sapiens; identical to SEQ ID NO: 9886

SEQ ID NO: 22520 - DNA, 201 bp, Homo sapiens; identical to SEQ ID NO: 9484

SEQ ID NO: 22521 - DNA, 201 bp, Homo sapiens
gtgaagattatcttgtatctgtcaggcttgtggactttggaaacattgaagactgtgtggacccaaaagcactctgggccattccttctgaacttctgtcrgttcccatgcaagcctttccatgttgcctctcagggtttaacatttcagaaggattatgttctcaagagggaaatgactatttctatgaaataataacag

SEQ ID NO: 22522 - DNA, 201 bp, Homo sapiens
tgatatgaaaattggaagtgaagaattagtttatataacgcatattgatgacccttggacattttattgccagctggcaagaaatgcaaatattttagaasagttgtcatgtagtattacacaattaagtaaagttttgctgaatttaaaaacatctcccttgaaccctggaaccttgtgccttgccaagtatactgatgg

SEQ ID NO: 22523 - DNA, 201 bp, Homo sapiens
gatctttcgtctttattgtcttacgtttctaattagttgggaggatttattttgctaaacagtttactaacacattacatttcaaaaactattttggtacmtttcaaatacagtgtttaaattaaaatagaaaaataagggctcatgacaagtacattatttgattctacttaggatagctttttagcaggatctccttca

SEQ ID NO: 22524 - DNA, 201 bp, Homo sapiens
ctagagaaatgagtatttgaagaatagaaaaagtacttgacatgattcctcattataaaatcagattgtcataattttgatagaaatacattttgttgttyacatcttttctggcttatctgtggttccatttctgatttgaattattttgtactcgtgataaagaatcaatagcaattcaaaggttccttttgttaggct

SEQ ID NO: 22525 - DNA, 201 bp, Homo sapiens
gatgcctttgttctctgaggaagaaagcagtgatggaagcaagcacaataatggtttaccagatcatatctcaggtatgtgaattttttttcctttttacttttttttttttttttttgagacagggtcttgctctgtcacctaggctggagtgcagtggtgtgatcttggctcactgcagcctctgcctcccaggctcta

SEQ ID NO: 22526 - DNA, 201 bp, Homo sapiens
ggcccctttttctggtcacctagccagacagtatttttctctcagcctctgctccaccacacagttctgtttgcccgtaagagcgaagcagataaagagakaacaaaaacaatctcctattactattcttcagatgacagaaagctcttttcctggttccactggctagagagacgggtcatctctcacatttgtaggtgc

SEQ ID NO: 22527 - DNA, 201 bp, Homo sapiens
caataatggtttaccagatcatatctcaggtatgtgaattttttttcctttttacttttttttttttttttttgagacagggtcttgctctgtcacctagrctggagtgcagtggtgtgatcttggctcactgcagcctctgcctcccaggctctagtgattttcccacctcagcctcccaagtagctgggactacaggtg

SEQ ID NO: 22528 - DNA, 201 bp, Homo sapiens
gtaaaacttattagggagcctgttgatcgtgtttctcccgtgatttgaaaaccacctgttcgagagttacttggtatatatatatatatgtatatgtgtgtatatatatatatatatatgtatatgtaatatatatgtatatatatgtgtgtatatatgtgtatatatatgtatatatgtgtgtgtgtgtgtgtgtgtgtg

SEQ ID NO: 22529 - DNA, 201 bp, Homo sapiens
tgatgatgaatcaaaagaattcttagaactggaatctattgagttacagaattctctggtggtggatgaagaaaaaggggagctaagcccggtgccaccgratgtgccactctcccaagagtgtgtcacaaaaggcgccatggagctatttacactgcagcttcctctcagctgtgaagctgagaaacagccagaactaga

SEQ ID NO: 22530 - DNA, 201 bp, Homo sapiens
taaaacttattagggagcctgttgatcgtgtttctcccgtgatttgaaaaccacctgttcgagagttacttggtatatatatatatatgtatatgtgtgtatatatatatatatatatgtatatgtaatatatatgtatatatatgtgtgtatatatgtgtatatatatgtatatatgtgtgtgtgtgtgtgtgtgtgtgt

SEQ ID NO: 22531 - DNA, 201 bp, Homo sapiens
tgaatattttcgaatgccggtggtgacctacccttgtgctttgtatggactctgggacggtgggagaggctggtctcggtcacaggtcggtgacctgaagrcactgatactaggcaaggcagtgaatgcaaagattgaattttattgctcctttgagcatgtgtattatgtcagcctgtatggagaagatgggattaatct

SEQ ID NO: 22532 - DNA, 201 bp, Homo sapiens
tatatatatatatatatatgtatatgtaatatatatgtatatatatgtgtgtatatatgtgtatatatatgtatatatgtgtgtgtgtgtgtgtgtgtgtrtgtgtgtatatatatatatatatatattttttttttttttttttttttttttttgagacagggtctcactctgtcacccaggctggagtgcagtggcgcc

SEQ ID NO: 22533 - DNA, 201 bp, Homo sapiens
tatatatatatatatatgtatatgtaatatatatgtatatatatgtgtgtatatatgtgtatatatatgtatatatgtgtgtgtgtgtgtgtgtgtgtgtrtgtgtatatatatatatatatatattttttttttttttttttttttttttttgagacagggtctcactctgtcacccaggctggagtgcagtggcgccat

SEQ ID NO: 22534 - DNA, 201 bp, Homo sapiens
taatgcagtggttcttagaattgaggcacattgagaataaaatcagctaatggtagctttaatatcatgtgaaaaatatatactaatcaaaaaggaaaaakaactaattgattatcagccttgttcacaccattctctagcaaaatataaaatatgccaatttcataatttttagagaaacttgatttgatggtacagtgt

SEQ ID NO: 22535 - DNA, 201 bp, Homo sapiens
ttattcaattagtgaagaatttctgaaggttaaggcacaggcttttaggtgcagtctttataatttaattcaaccagttggccagaatccctttgtttggratgtaaaggcaatacaagctttcaatgaatttatagataatgcatggcaaaaaaatctagaattaaaatgtacaatatttgctctggcttcaattaatga

SEQ ID NO: 22536 - DNA, 201 bp, Homo sapiens
tatatatatatatatgtatatgtaatatatatgtatatatatgtgtgtatatatgtgtatatatatgtatatatgtgtgtgtgtgtgtgtgtgtgtgtgtrtgtatatatatatatatatatattttttttttttttttttttttttttttgagacagggtctcactctgtcacccaggctggagtgcagtggcgccatct

SEQ ID NO: 22537 - DNA, 201 bp, Homo sapiens
caaacttagtcactcaatatcaagactctgtgggaaataaaaatagtcaagtgtttccattaacaacagaaaagaaagaagaaatttctgctgagacaccyttgaaaacagcaagagtagaagctactctttcagagagaaaaataggagattcatgtgacaaagatttgcctctgaaattttgtgagttcccacagaaga

SEQ ID NO: 22538 - DNA, 201 bp, Homo sapiens
tatatatatatatgtatatgtaatatatatgtatatatatgtgtgtatatatgtgtatatatatgtatatatgtgtgtgtgtgtgtgtgtgtgtgtgtgtrtatatatatatatatatatattttttttttttttttttttttttttttgagacagggtctcactctgtcacccaggctggagtgcagtggcgccatcttg

SEQ ID NO: 22539 - DNA, 201 bp, Homo sapiens
taatcacatttaaaatgtaatcacatttataatcaagagggcatgtgttggtaagttttataaaacatggtattcccttgccaaatttatggcactactayaggcattaatttacactaaggattatttcaacagggtcttttagacttaactgtatcatgcattgatcttgcaattcattagaaacccttaaagaaaaaa

SEQ ID NO: 22540 - DNA, 201 bp, Homo sapiens
cccagggtagtcagggactttggtcagtggtttatatagtagttaagtgtcaaagactttgctgtgcttatttggctctgttctgcatgtgcatagctcargggcaatcctgagacttagagttcacatgtagcattaggagttaaacattttcaactcctttcctctctgagatgtcctccacattttctggctcccagg

SEQ ID NO: 22541 - DNA, 201 bp, Homo sapiens
tagaaaagcaataagagattatatgggggggcgggcactgtaagaattttaaacaaaattgagggagacagtcataccaatgtactaattacatgatattratgatatagaaataatgcagattaggaaaatgctttgcttgtgtatgttacattaaggaattaagagatatgcattgagtcttactcaattcaatttggc

SEQ ID NO: 22542 - DNA, 201 bp, Homo sapiens
cggcgggtgcccgacagcctcttccgttcgctgctggagcgctatctcacagcggccactgctagcgtgggctccggggtcccggttctctcgcgagtccygctcaagcaaaagcagcctggtctggattacttctatccccagctgcagctgggcgtgacggaggccgtggtcataacccaagtgtgccatccccaccgc

SEQ ID NO: 22543 - DNA, 201 bp, Homo sapiens
gagatttcctacctatttcttactctctagcattcagggttcctttatccctagtccactggctataaataagaaatttctctcagagttttgctgtctaygctagctaggcagttttgatttggcccaccctcagatcaaaatcaggagacaaagaagtaaaaaaaaagaaaagaaaaggcctatgaaactcactcctgt

SEQ ID NO: 22544 - DNA, 201 bp, Homo sapiens
tatatatatatatgtatatgtgtgtatatatatatatatatatgtatatgtaatatatatgtatatatatgtgtgtatatatgtgtatatatatgtatatrtgtgtgtgtgtgtgtgtgtgtgtgtgtgtgtatatatatatatatatatattttttttttttttttttttttttttttgagacagggtctcactctgtca

SEQ ID NO: 22545 - DNA, 201 bp, Homo sapiens
gaattaagagatatgcattgagtcttactcaattcaatttggcagctcaactacagaacacctacactctgaaagcctttactgttggatctaaatgtgtkgtgtggtcaagtctaagaaacacatggtctaaatgtgagattttagaaacagctgaagaaggaacaagggtaagtgatgtttaagtactttatctccaaa

SEQ ID NO: 22546 - DNA, 201 bp, Homo sapiens
cctctagtaaaggagagctggaagttggaagtacagtagaagtcagagtgtcttatgttgaaaaccctggctatttctggtgtcagctgaccaggaacatrcaaggacttaaaactctaatgtctgatattcagtactattgcaaaaatacagctgctcctcaccagagaaacacccttgcttgtttggctaagcgaacag

SEQ ID NO: 22547 - DNA, 201 bp, Homo sapiens
tcttcagatgacagaaagctcttttcctggttccactggctagagagacgggtcatctctcacatttgtaggtgcctatgttgccatagctgtcaccaggmagtaactggggttagccaccctcagggcagggccagaaaaaaaaatagaaataaacataacaccacaatacagcaaagagatttcctacctatttcttac

SEQ ID NO: 22548 - DNA, 201 bp, Homo sapiens
tggggctgaaatgtttcatcctggttgccttacagagagaaataggccaccctttggccagttcctccaagtggctgatgtgtgagaatttttttttttttaagttttaattttgtgtagtttctcttaagccatttcctcatgagtgtatcggtccagctttattcagttccgttttgcctgtatttcacattttaaact

SEQ ID NO: 22549 - DNA, 201 bp, Homo sapiens
ctcaaatttaataagaacggtgatgataatagtaacatttattgagtatgttttgttctgggcactgtactaagtgctccacatgccttatttaaatgatytctccagccctgtgaggacaatatagtcctgttgtataaagggatgaatatggcctaagtactattattcatattataagcttgagataacggaggctca

SEQ ID NO: 22550 - DNA, 201 bp, Homo sapiens
ctgcctttttactttgttcagaagattgagcgagtacagaacctggccctctgggaagtctaccagtggtgcgttggggctcgctcttggtgggctggtgrctctgtcccttcacaccactggctggttgccacatgtggcccgggtttccaggaaaagcagagcggcagttagggctgccatgtgctgggagctgtgtgt

SEQ ID NO: 22551 - DNA, 201 bp, Homo sapiens
gtttgttgttttacttaaaattgcagtttccaagaacctatcaatgacatttcatgaggaccgattgtctcctgtgcctggagaaaccacaggagaatgtkgtcactgctctctgggcttttgtgcttctgcggttctagtgtttacaagaagctttgggaagggactgatttatattctgcacgttgatggtaatgcatt

SEQ ID NO: 22552 - DNA, 201 bp, Homo sapiens
ctgatgattaatgatgtttaacttttatttacatgtacttttggggcatctgtatattttctgtgaagtatctactcaaatcttttgcctattttttatawaacagctttacacacacacacacacacacacacacacacacacacacacaaaaggggtcttcagaaagtttgtggaaaatgcatattatgaaaaaattat

SEQ ID NO: 22553 - DNA, 201 bp, Homo sapiens
cagtgagttttgacaaatacatacacttgtgtagccagcattctgattgagatacggatcattttcctcaccccatctccttccagtcagtgcctactccyatcgttcaccaccgttctgacctctgtcaccatagatctctgtcttgcctgttcttgaacctcatataaatagaaccgtgtggtatgtactgttgtgtct

SEQ ID NO: 22554 - DNA, 201 bp, Homo sapiens
agcttgacaaccgaacacaacctgagtgtgctgagaactcatggcgttgaccacctgagctataatgagctatgccaactcttgtttcagaacgacccctkgcttttgccagaagtgagtgccaggggaagtctgggttccacagctccctggggacattcctgtgtcttgggaaatgtaatgactgggagtggaatgggt

SEQ ID NO: 22555 - DNA, 201 bp, Homo sapiens
agcagccgacagtgagcgcacaggagtgttccaggcctttcacctgctctgccttgaaatggctatttgggcctttccttttctttttaaacagaaacttytaatgaactgttctcttaacattgacctctcaatgaagttatgttcttaatctcttgctaataatgatttttacttttaagtcacttttgggttcactag

SEQ ID NO: 22556 - DNA, 201 bp, Homo sapiens
ttgagaggccgaggcaggtggatcacttgaggtcaggagtttgagacccgcctggccaacatggtgaaaccctgtctctactaaaaatacaaaaattagcygggtgtggtggcacatacctgtaatcacagctacttgggaggatgaggcaggaaagtcacttgaacccgggaggtggaggttgcggtgagccgagaccgt

SEQ ID NO: 22557 - DNA, 201 bp, Homo sapiens
acaagattggaaggaacaatttaaaagcactcatgtataattgatatgtcaattactaatcattcctctattcattaaacccagtctcctaaggatacctrttttctttatgaatatttgaaatgtgtaaaatggccctatttttaacagactgattctgggttttacacatttggataagctttcaaatctatctaattt

SEQ ID NO: 22558 - DNA, 201 bp, Homo sapiens
tctctatagatttgcttgaatatttcatataaatggaatcatacagtattggtctttagtgacagttatacccatttttattgggttatttgatctcttawtgagttgtgttttgtatatgatttatactgaagatatatccttccagtctttcatgtttatttcctttatagtgtacaggtattttaatagtggtgtcca

SEQ ID NO: 22559 - DNA, 201 bp, Homo sapiens
ttgtgtggtagttgggacacaggcgagaaatagatctctcaggactgtttggagtttggctacataggcaaagataaaagtgctctcatgttgtgaatatygtgctaacattcttccttgccttctacctgctcttgaaatatgatgtgctgagacgcaagactggtgatattggctagcagagaccacctatggtatatt

SEQ ID NO: 22560 - DNA, 201 bp, Homo sapiens
aggaagcatcagcctggagggccctaaggagtgcaccttccccaggatgtgcctgtttgcagggagatcctgtctcaggctgtccatagtacacctgtgcytggggtttgtaggtatagcatttgactactgggatgccctggggtggccttctgctctcatccctgatcatttcctctaatgcctttcagggagggaaca

SEQ ID NO: 22561 - DNA, 201 bp, Homo sapiens
agctatgattgtgtcactacactccagtctgggtgacagagctagatcttgtctctattaaaaaaaaaaaaaagaaaaagatgcactgtatgtattgctgmtataatatttttaatcctagaggttagaaattcgtattgttttaggcagtcagtatttgtttaagcttacacaattaccattttgtttcttactcaccat

SEQ ID NO: 22562 - DNA, 201 bp, Homo sapiens
ctccagctgtctccccagcacttagcgtccatgttctgtgcatagcatgtggccagtgggatgtgtggaagggattgctgaggtttatgctaaagaatttrggcctcaccctggaggtgatggggcgggtaaaatggcaggagagagcaaccatcaggtttgcgttttaggaagtctaaggtagtggtgtgggtgccaatt

SEQ ID NO: 22563 - DNA, 201 bp, Homo sapiens
ttcaaaggtatcctgtgccctgccctcgcccagcagagcctgcctgtgttggctctgtccctacaccttaaccctggaggagccgtgtgcacatactgagrgcctgggtgggtacaggaaagaaaagcaaggtaccaggtccaaggtagacctggagacagatgacactggccctgtgcagtggaggaagaactgcatcaa

SEQ ID NO: 22564 - DNA, 201 bp, Homo sapiens
aggagccgtgtgcacatactgagggcctgggtgggtacaggaaagaaaagcaaggtaccaggtccaaggtagacctggagacagatgacactggccctgtrcagtggaggaagaactgcatcaaggatgtgaggagaatggaccccaggaggggcaggagccccaagtgtggaggacaagcagggtcagcatgcatgtagc

SEQ ID NO: 22565 - DNA, 201 bp, Homo sapiens
agaaatttggaatgtggagcagaaggagcagtgaagttcaagggccagctttgccaacaacccagttccacaaacatcacacagatgccatggatagctgkgcgactagggctgattctttaacttctctgagcctctcagtgtgctccattgagaaatgaaagggtggtatttggccttctctaagatgctttaagccct

SEQ ID NO: 22566 - DNA, 201 bp, Homo sapiens
ttcaaggtccacttgagcaacaaagcaaaagaccccatctcttaaaaaaaatgtaagacttgagagggttttcctggcaggcaaggacagaacaaacactkctaggtatttgtcatttttcaacttgaggggccagttcccccaaccccaaatcctcaggatgagtatgggattcttgagggtggggaagcaagaaatttg

SEQ ID NO: 22567 - DNA, 201 bp, Homo sapiens
aaaccacaagaaaatctcataatgttttaagaaagtttacagatttgtgttgggtcacattcaaagctgtcctgggttacatgcagcctgcgggctgcagsttggacaaggctgccttcgatgaagatttgttggaaaactgtttttggtttgtctgaatatgtatgtacgtatgtatgtatgcatgtatgtatgtatgta

SEQ ID NO: 22568 - DNA, 201 bp, Homo sapiens
tcatgttggccaggctagtctcgaactcccgacctcaagtgatccatccaccctggcctcctagagtcctgggattataggcgtgagccaccatacccagsctacatgctggtttttctctggtgcttgtaaatactgtcaggaagtgtttctgaaaaattgtcatgaagactgattttatcagctttcagtttgccagcg

SEQ ID NO: 22569 - DNA, 201 bp, Homo sapiens
caggaagtgtttctgaaaaattgtcatgaagactgattttatcagctttcagtttgccagcgctgccataacaaagtaccatagactaggaggcttaaacracagaaatcgattttgtcacagttctggaggctagaagtctgagatcaaggtggcagggttgatttcttctgaggcccctctccttggcttgtagatggc

SEQ ID NO: 22570 - DNA, 201 bp, Homo sapiens
agtgcatccacctggcaggtgacctggaggagtagcttccccgaggacccccaggcttggcctgtgattgcgcaaacccacatttcctaagcacactggamacccttcgagtgtgggttttaacatccctgtgagattgaatacttgtgccacacatgtcacaaaagagtatggaaataaaagaaaatttatccgaagtgg

SEQ ID NO: 22571 - DNA, 201 bp, Homo sapiens
cgggttcatgccattcttctgcctcagcctccagagtagctgggactacatgcgctcaccaccacgccccgctaattttttatatttttagtagagacggrgtttcactgtgttagccaggatggtctcaatctcctgacctcgtgatcctcctgcctcggcctcccaaagtgctgggattacaggcatgagccaccgtgc

SEQ ID NO: 22572 - DNA, 201 bp, Homo sapiens
gaactgttctcttaacattgacctctcaatgaagttatgttcttaatctcttgctaataatgatttttacttttaagtcacttttgggttcactagtggaytaaccagaagtgattgtagttgagtccagttttgctttttaataatgtgttgaagttttagtttttactctttgttgactttgctgcttattggcaccag

SEQ ID NO: 22573 - DNA, 201 bp, Homo sapiens
ctcggcctcccaaagtgctgggattacaggcatgagccaccgtgcttagccaaatctcttcttataaggacagtagtcttgtgggtttggggcccaccctrtggacctctttttaacttaattacctctttagagaccttctttccaaatagagccatatcctgaggtcgtgggagttaggactccaacatagaaattttg

SEQ ID NO: 22574 - DNA, 201 bp, Homo sapiens
ttcccccagtaacactttcacacataacttatttactgttccttttacttctggaagattccgagaggaaagattgctgggtcaaaggtcacacgtgtttycaattttaatagctattcctggattacctcctcaaagggctctaacaactcgcattgctctcagcgtgtgagagggtcctttgctctgaagggtcttcta

SEQ ID NO: 22575 - DNA, 201 bp, Homo sapiens
acagtagtcttgtgggtttggggcccaccctatggacctctttttaacttaattacctctttagagaccttctttccaaatagagccatatcctgaggtcstgggagttaggactccaacatagaaattttgaggagactcaattcgacatataacaccagctctgcttctttgcaggaagaactgtaggaatagtcacag

SEQ ID NO: 22576 - DNA, 201 bp, Homo sapiens
attgtctcatgtgaaaggagcagctctagtcactttgaagttcttggattttcccagtggaggggctgattctgtgcagtctcctttccatttcgttcccmttttagccaagggcatttgttagcagccgtcatctagagtgagggatgtaatagctgtgttctgtgtggatgatggaatcacagcttgtgaagccccttt

SEQ ID NO: 22577 - DNA, 201 bp, Homo sapiens
gcacagctctggggagcattccttgtgttgtattctgattttacaaaatgagtgaaagaagcataccttaattatggcattggctgtattcctgacatcartaagtagagtttttgagccattgtaaatttgctttgttccctgctcatctccagcacctagacagtgcctggcccacagtaggtactctgacatttgttg

SEQ ID NO: 22578 - DNA, 201 bp, Homo sapiens
gagccctcgtgtgtcatttcagggagctactttgcccgagatgctgcatattcccaccactacagcaaatccgacacgcagacccacacgatgttcctggyccgggtgctggtgggcgagttcgtcaggggcaatgcctcctttgtccgtccgccggccaaggagggctggagcaacgccttctatgatagctgcgtgaac

SEQ ID NO: 22579 - DNA, 201 bp, Homo sapiens
tgttccaggcctttcacctgctctgccttgaaatggctatttgggcctttccttttctttttaaacagaaacttttaatgaactgttctcttaacattgayctctcaatgaagttatgttcttaatctcttgctaataatgatttttacttttaagtcacttttgggttcactagtggactaaccagaagtgattgtagtt

SEQ ID NO: 22580 - DNA, 201 bp, Homo sapiens
gtcccacccctggaggttctgattcagtcagtctggagtgaagtcagtctagggcagaatcaggcacttgtgtttttaaatgggtctcctagtgaattgartggacagcgagagttgagaaaggagtccccttcatggagtcctggatctggcaagcagccatgtggcgtcaggctgccagcctgtcactaaaaagtagag

SEQ ID NO: 22581 - DNA, 201 bp, Homo sapiens
cccaccactacagcaaatccgacacgcagacccacacgatgttcctggcccgggtgctggtgggcgagttcgtcaggggcaatgcctcctttgtccgtccvccggccaaggagggctggagcaacgccttctatgatagctgcgtgaacagtgtgtccgacccctccatctttgtgatctttgagaaacaccaggtctacc

SEQ ID NO: 22582 - DNA, 201 bp, Homo sapiens
atgttccattgagcattgaagtacatatatgtgagtatttccatagatagattctggggaatggaatgataggtcaaggaatatgagctatatatatatayacacacatatatatgtgtattctgaaagcaatattactgagctatagtttacacaagctaaagtgtaccattttaaatgtatactgagttttgataagta

SEQ ID NO: 22583 - DNA, 201 bp, Homo sapiens
acttcccgtgtggttgtgatatttgttttatatgtttttaaacagataggagcatgtgataatgttattattcaatctgcatcttaacattgtatcttggrgattttttttccatgtcagtatgtgaaagtccacctcattttaaaaacaagtgtgtagtagttgattataatgatgttccattgagcattgaagtacata

SEQ ID NO: 22584 - DNA, 201 bp, Homo sapiens
agtggacagcgagagttgagaaaggagtccccttcatggagtcctggatctggcaagcagccatgtggcgtcaggctgccagcctgtcactaaaaagtagwggatccacctgtgtaggagcactttcaccccaaacacgatagggctttgtgagcttgcgttgcccacttttgtgcagagaactgaatgaatcctctttaa

SEQ ID NO: 22585 - DNA, 201 bp, Homo sapiens
tggctacttttaagagcttctgtttgtcttggaggtaggcatcctcactaaagtgtatctaagtatgtgcttttatttatcatggttgagattctttgggsttcttaagctgcggataggtgcatctcatcagttctctttgaaaatcgcctccactgtcttgtctctcctctcctagagcttcacttaggttctgatcat

SEQ ID NO: 22586 - DNA, 201 bp, Homo sapiens
atttcagaattgtggataaaggtttatggctgtgtgtgtgctcctttaaccatgtactccatcccttttatcccttttgtgtggtagttgggacacaggcragaaatagatctctcaggactgtttggagtttggctacataggcaaagataaaagtgctctcatgttgtgaatatcgtgctaacattcttccttgccttc

SEQ ID NO: 22587 - DNA, 201 bp, Homo sapiens
gggcagaaatgagtttatgggctgggcttaaccaataaataccaattttattaagcgagaaaaggagaagcagcctggggaggacctgagtccgatggacrtttggaatggggttactgtcaggagggaaggcattcacgactagcagacaggagaatggacagtcaatttggcagcttgttgaggggctctgaccagtgg

SEQ ID NO: 22588 - DNA, 201 bp, Homo sapiens
tggctggagccttacaggcctagtcagggtagcctgtgacctgcgtctcttggtcccaggacacttttggaattttggaaaaatgtgttgttttgcatcargccggctgtatttggtggccggcacactctgcccccagcacacattcttctgtgattctaggcaaaaaggacagatgcagaagcagaacggagggaaggc

SEQ ID NO: 22589 - DNA, 201 bp, Homo sapiens
gaaaattttaatttttttcaagtatcaaattagctagtttcattattattttgaaatacaaattaaaaatgtacaaaggacactcagtaagaaataagtcsccctcacaccagttttctccagaactcaagtcccctccaagaaacagccataattatccattctttgaatatcctttcatcgagactgtatacgtgtaca

SEQ ID NO: 22590 - DNA, 201 bp, Homo sapiens
ctggagccttacaggcctagtcagggtagcctgtgacctgcgtctcttggtcccaggacacttttggaattttggaaaaatgtgttgttttgcatcaggcyggctgtatttggtggccggcacactctgcccccagcacacattcttctgtgattctaggcaaaaaggacagatgcagaagcagaacggagggaaggccgt

SEQ ID NO: 22591 - DNA, 201 bp, Homo sapiens
agggagagtggagacatggcacagagggagggagggagatgcggggtggaagagtagaggccctggcgttgcacatcaccaggacgctattcgcagtgtgstgacccttcctggctgcaggcccctccaccagctgagccctcgtgtgtcatttcagggagctactttgcccgagatgctgcatattcccaccactacagc

SEQ ID NO: 22592 - DNA, 201 bp, Homo sapiens
tatatgtatattttttcactggttatgttttttttcagccttcgttcagaaaaacctggtctatggcacaactaaaaaggtttgccgcagacccaaatacrtgtctccccaggatgtgacgaccatgcaaacctggtaggttgcagtggggggcttggtacttaggatgtaatcagctggggtgtgctctgcagtggtgac

SEQ ID NO: 22593 - DNA, 201 bp, Homo sapiens
tacccagagtatgtcatccagtacaccacctcctccaagccctcggtcacaccctccatcctgctggccttgggctccctgttcagcagccgacagtgagygcacaggagtgttccaggcctttcacctgctctgccttgaaatggctatttgggcctttccttttctttttaaacagaaacttttaatgaactgttctct

SEQ ID NO: 22594 - DNA, 201 bp, Homo sapiens
aggctgggctgaggcttttttatatccaagctgggaaaaattgccaagcaaaataatggtttaaacaagattggaaggaacaatttaaaagcactcatgtrtaattgatatgtcaattactaatcattcctctattcattaaacccagtctcctaaggatacctattttctttatgaatatttgaaatgtgtaaaatggcc

SEQ ID NO: 22595 - DNA, 201 bp, Homo sapiens
aacagtgcaggcaagaagtgctaaggacctaaaggggttcaacatgtttgtctagacgactctgtggtccttggaccatgtagtccaacctgtgtctttgrcctgtgtgggacaagaaaaaaaaaaggcagggacatccaggggataccctcgatggtggcttaagcatcacgtgtctgtcctttagattggtttcacagt

SEQ ID NO: 22596 - DNA, 201 bp, Homo sapiens
ctactcaggaggcattgagcctggtggtctagggcacagtcccaagatccagcccaccttgtttcaacctgggctctgctccttgctagctgatggcttcrggcaagtgactttacctccaggtctcagttccctcatctgcaaagtggagttaatgatattactaccctcacaggctggttgaggactgaatgattaact

SEQ ID NO: 22597 - DNA, 201 bp, Homo sapiens
tttactgttccttttacttctggaagattccgagaggaaagattgctgggtcaaaggtcacacgtgtttccaattttaatagctattcctggattacctcytcaaagggctctaacaactcgcattgctctcagcgtgtgagagggtcctttgctctgaagggtcttctaaaatatttgttcaatcgttacttagcagggg

SEQ ID NO: 22598 - DNA, 201 bp, Homo sapiens
tcctggattacctcctcaaagggctctaacaactcgcattgctctcagcgtgtgagagggtcctttgctctgaagggtcttctaaaatatttgttcaatcrttacttagcaggggctgggagtaacggattttattttattttattttattttttgagacggagtctcgctctgtcgcccaggctggagtgcagtcgcgca

SEQ ID NO: 22599 - DNA, 201 bp, Homo sapiens
taggttatcaagttcgagggggctgatcgaaaagagggatgcatgggaggtttttgtgggccaggtctagaagtggtggatttcctttcacccacatcccmttgaccagaagctgtctcgtgaccctgtctagatgcagggtgactgggaaatgcctctaggaagcagctgtctggaagtatctagattagagctttccaa

SEQ ID NO: 22600 - DNA, 201 bp, Homo sapiens
ggttggccctcgttttgttatataaatggcaaatattttctcttagtttgttgtttgccttttgactttgcctgtgaagtattttaccataaatatatatytcttattattttagttaaatgtatcagtgtcttactgattctggatttagagttttggttgattatgaccctcctatttctggaagtcattttttattct

SEQ ID NO: 22601 - DNA, 201 bp, Homo sapiens
gtctgtgtcacattgtcagaacaggtggctgctgtgtggtgccatcgagtccctgctggttccccttgtcctgggagggtcacccattgcccaaggaagtrcatccacctggcaggtgacctggaggagtagcttccccgaggacccccaggcttggcctgtgattgcgcaaacccacatttcctaagcacactggacacc

SEQ ID NO: 22602 - DNA, 201 bp, Homo sapiens
tggctacataggcaaagataaaagtgctctcatgttgtgaatatcgtgctaacattcttccttgccttctacctgctcttgaaatatgatgtgctgagackcaagactggtgatattggctagcagagaccacctatggtatatttgctttgtgtaagaataaaatgtctacgtgtttttgtttacatttttgtagcaata

SEQ ID NO: 22603 - DNA, 201 bp, Homo sapiens
gtcacattgtcagaacaggtggctgctgtgtggtgccatcgagtccctgctggttccccttgtcctgggagggtcacccattgcccaaggaagtgcatccmcctggcaggtgacctggaggagtagcttccccgaggacccccaggcttggcctgtgattgcgcaaacccacatttcctaagcacactggacacccttcga

SEQ ID NO: 22604 - DNA, 201 bp, Homo sapiens
ggcagcaccacacctgttgacaaccacaaggctagggcatgctgtgtattgcccagctatcttactcctttatgtttttatttcagataagtgccatagarttcatttccatttgccgtatcgatggcaattcttggatagaggcaaatgggaggatttggacaacatggaacttattgaagaggcatattgcaatcccaa

SEQ ID NO: 22605 - DNA, 201 bp, Homo sapiens
ttagtcctctactcaggaggcattgagcctggtggtctagggcacagtcccaagatccagcccaccttgtttcaacctgggctctgctccttgctagctgrtggcttcgggcaagtgactttacctccaggtctcagttccctcatctgcaaagtggagttaatgatattactaccctcacaggctggttgaggactgaat

SEQ ID NO: 22606 - DNA, 201 bp, Homo sapiens
aatgcattaaaaacatttgccccttgcagaagatcacccttagttcttcctcggaagagtatcagaaggtctggaacctctttaaccgcacgctgcctttytactttgttcagaagattgagcgagtacagaacctggccctctgggaagtctaccagtggtgcgttggggctcgctcttggtgggctggtgactctgtcc

SEQ ID NO: 22607 - DNA, 201 bp, Homo sapiens
tcctcctccttgtcctcctccttgtcctcctcctcgtcctcctcctcttcctcttcctcctcctcttcctcttccccctcctcctcctcttcctcctcctycttttggtagataccagtatccataaaagaagcttgagatgaattggcttcttcccccacaacttcacttctaagtataaagcaagtctcaaagcaaact

SEQ ID NO: 22608 - DNA, 201 bp, Homo sapiens
atttttagtagagacggggtttcactgtgttagccaggatggtctcaatctcctgacctcgtgatcctcctgcctcggcctcccaaagtgctgggattacrggcatgagccaccgtgcttagccaaatctcttcttataaggacagtagtcttgtgggtttggggcccaccctatggacctctttttaacttaattacctc

SEQ ID NO: 22609 - DNA, 201 bp, Homo sapiens
tgcttatcagacgcttgtggatggaaagaatggaggaagagagcaaaaaaaaaaaaaagagctaggttcagggctctgtgtgtgtgtgtgtgtgtgtgtgtatacacgcctgcacgcatgcacatatgtaacctataatgataagatgccatgctcattgattcagcctgtggctaactgcttaccgactgactgctgtgc

SEQ ID NO: 22610 - DNA, 201 bp, Homo sapiens
gtgcttatcagacgcttgtggatggaaagaatggaggaagagagcaaaaaaaaaaaaaagagctaggttcagggctctgtgtgtgtgtgtgtgtgtgtgtgtatacacgcctgcacgcatgcacatatgtaacctataatgataagatgccatgctcattgattcagcctgtggctaactgcttaccgactgactgctgtg

SEQ ID NO: 22611 - DNA, 201 bp, Homo sapiens
tgggttctcagggcatggtgccaatgtctggctcaccctggtgcttatcagacgcttgtggatggaaagaatggaggaagagagcaaaaaaaaaaaaaagagctaggttcagggctctgtgtgtgtgtgtgtgtgtgtgtgtatacacgcctgcacgcatgcacatatgtaacctataatgataagatgccatgctcattg

SEQ ID NO: 22612 - DNA, 201 bp, Homo sapiens
ccttcggggtcccatagacctagattttgagtgaagtatctcaggggcttataaaaagaaaagggaagatgaataacgacaggtgacactaaatagggatkgcaaattaattttatgtgctcattggggttagctgggtgagggtaaatgtcataggtaaagactcattggcatggtgctagtaaaggtaaaatagaaagg

SEQ ID NO: 22613 - DNA, 201 bp, Homo sapiens
caggagtggatcagatctgaggtagcgtctgaggcctgaaaagaggctgagggtggaactctggggaaatcagccttcagggatgaggcagtccaggggasagcagggaacaacagcccacgaggaggaaggcacacagcaaatggtggctggatagagccactcatgggggtaactggtagatctgtttcatgttcatat

SEQ ID NO: 22614 - DNA, 201 bp, Homo sapiens
cccaggagtggatcagatctgaggtagcgtctgaggcctgaaaagaggctgagggtggaactctggggaaatcagccttcagggatgaggcagtccagggragagcagggaacaacagcccacgaggaggaaggcacacagcaaatggtggctggatagagccactcatgggggtaactggtagatctgtttcatgttcat

SEQ ID NO: 22615 - DNA, 201 bp, Homo sapiens
tccacctctgcaggttcatggtctacggcgcctgcaagttcctgagagccgggtaaggcgccgcgccgggagcgacggcgggcggaggtcctgcgcgcccycacgcacttccagcccgcttgggggtcctacttgaagtttgagcagacaattcggtggctctgccctgacctcgcaccgtcattcactaaagcgagcgtt

SEQ ID NO: 22616 - DNA, 201 bp, Homo sapiens
cccaggcttggcctgtgattgcgcaaacccacatttcctaagcacactggacacccttcgagtgtgggttttaacatccctgtgagattgaatacttgtgycacacatgtcacaaaagagtatggaaataaaagaaaatttatccgaagtggatgaagactgaagctcatttttctgcgtctattgattgagcacctactg

SEQ ID NO: 22617 - DNA, 201 bp, Homo sapiens
gttcaggttctgtgtccccaaacactcttagccaggaggagggtgatcagatctgtttgtaccatatccggaaaagttgtagctttcaaggtaagttggargaggctccttcattccacttgtgggaggggtaactgcttgtcattcccagagctgtgctctgaagtcaccccctaccaaacctctaccccatccggagag

SEQ ID NO: 22618 - DNA, 201 bp, Homo sapiens
ttgggttctcagggcatggtgccaatgtctggctcaccctggtgcttatcagacgcttgtggatggaaagaatggaggaagagagcaaaaaaaaaaaaaagagctaggttcagggctctgtgtgtgtgtgtgtgtgtgtgtgtatacacgcctgcacgcatgcacatatgtaacctataatgataagatgccatgctcatt

SEQ ID NO: 22619 - DNA, 201 bp, Homo sapiens
tttgggttctcagggcatggtgccaatgtctggctcaccctggtgcttatcagacgcttgtggatggaaagaatggaggaagagagcaaaaaaaaaaaaaagagctaggttcagggctctgtgtgtgtgtgtgtgtgtgtgtgtatacacgcctgcacgcatgcacatatgtaacctataatgataagatgccatgctcat

SEQ ID NO: 22620 - DNA, 201 bp, Homo sapiens
tcttgctaataatgatttttacttttaagtcacttttgggttcactagtggactaaccagaagtgattgtagttgagtccagttttgctttttaataatgygttgaagttttagtttttactctttgttgactttgctgcttattggcaccagggacagagtttctagatacaattttatggattggttttaatttttatg

SEQ ID NO: 22621 - DNA, 201 bp, Homo sapiens
ctttgggttctcagggcatggtgccaatgtctggctcaccctggtgcttatcagacgcttgtggatggaaagaatggaggaagagagcaaaaaaaaaaaaaagagctaggttcagggctctgtgtgtgtgtgtgtgtgtgtgtgtatacacgcctgcacgcatgcacatatgtaacctataatgataagatgccatgctca

SEQ ID NO: 22622 - DNA, 201 bp, Homo sapiens
gcgcgcagctccacctctgcaggttcatggtctacggcgcctgcaagttcctgagagccgggtaaggcgccgcgccgggagcgacggcgggcggaggtccygcgcgccctcacgcacttccagcccgcttgggggtcctacttgaagtttgagcagacaattcggtggctctgccctgacctcgcaccgtcattcactaaa

SEQ ID NO: 22623 - DNA, 201 bp, Homo sapiens
tgctcatctccagcacctagacagtgcctggcccacagtaggtactctgacatttgttgaatgaatgagtgtgctaggatacttattttttaaaaaagacygtcaggtttagtgacaggcagattttgaacagagatttttatttaataagcatttcttgagtacctcttgtggggcagatgaataatgtggtctgtcagg

SEQ ID NO: 22624 - DNA, 201 bp, Homo sapiens
gtgcacagtgatgaagtctgggaatgggagaggggagaaggatgggcacccactgaccagcagcctgaaaattcctacagcatcccagggctcagctccaygcaggagcaaggtgggggtggggttgggggaaatggtacccattttccaagggctgctctgcttttggagtccagggaaccgctgctgtctggagctgtg

SEQ ID NO: 22625 - DNA, 201 bp, Homo sapiens
gaatcgtgattccatgtgggaaacagtcctgcagtcgggggacaggaggagccaggctggaatccaacacaaacagtccaggggcagagggaacattcccrggtacctgtgtccctgagtgacttgaaaatgctgaacttatgctgaattctgtttaatgattatttgcgggaggggaacaggcattcttaagagatcggt

SEQ ID NO: 22626 - DNA, 201 bp, Homo sapiens
tcctttctcttttccctttttcttttttctcttttttgttaacttctttccctacaaaaattgtcattttcatttttctcaaagccagcagagccattagyataccatatgtatagtgacaggaaaagccctgacctcattcttatcttttcttgcagattcggtatatttcacaaacacagggtttgcctgctgaatatt

SEQ ID NO: 22627 - DNA, 201 bp, Homo sapiens
ccaaagaatggaaggattgttgtagcacagcgcctctcctgagagccacaggcccttcagaggaggagtcagtaatggcaccccaggtttgaaagatagtrttcatatagaaacagcttcctgcatttccaacttgctaatggtttcttccattcttccttttcagggcccctgagatcatccttggtttaccattttgtg

SEQ ID NO: 22628 - DNA, 201 bp, Homo sapiens
ttcctggggcacagcccctctctgcctttcctgcagagagaaaagccacatcctgtgggcaatgacaacatgtgggtggtgcctcccataggggcagagtycctgggaactgagaaagggggcttgagagatcaggaggaagttacagggcaaaaaataaggggagccaggagaggggaggcacgctggggtcttccttgg

SEQ ID NO: 22629 - DNA, 201 bp, Homo sapiens
cctgaccatgacctttaacaaccagctgaccactgtccacaaccaggtaagtgggaaacagaagggaaggagaggcggggctgcacagtgtgagcctcagracttgtattttccatcatacctagtcaggaggcaaaattcctgctgtcatgttcaacaactaaacaaagtatttgcatccaaggttatttcctttgaggg

SEQ ID NO: 22630 - DNA, 201 bp, Homo sapiens
gcaagcgtcgggtgaatatgtatgacacggtgaaccagagcaaaacccctttcatcacgcacgtggcccccagcacgtccaccaacctgaccatgaccttyaacaaccagctgaccactgtccacaaccaggtaagtgggaaacagaagggaaggagaggcggggctgcacagtgtgagcctcaggacttgtattttccat

SEQ ID NO: 22631 - DNA, 201 bp, Homo sapiens
catgtttccagaacatggagatctgcaagcgtcgggtgaatatgtatgacacggtgaaccagagcaaaacccctttcatcacgcacgtggcccccagcacrtccaccaacctgaccatgacctttaacaaccagctgaccactgtccacaaccaggtaagtgggaaacagaagggaaggagaggcggggctgcacagtgtg

SEQ ID NO: 22632 - DNA, 201 bp, Homo sapiens
ggaaggagaggcggggctgcacagtgtgagcctcaggacttgtattttccatcatacctagtcaggaggcaaaattcctgctgtcatgttcaacaactaawcaaagtatttgcatccaaggttatttcctttgagggacccaggcacattttgtgttgacttctggccccattgacaggtcccagaaaggactggtgaggg

SEQ ID NO: 22633 - DNA, 201 bp, Homo sapiens
tgggaaacagaagggaaggagaggcggggctgcacagtgtgagcctcaggacttgtattttccatcatacctagtcaggaggcaaaattcctgctgtcatrttcaacaactaaacaaagtatttgcatccaaggttatttcctttgagggacccaggcacattttgtgttgacttctggccccattgacaggtcccagaaa

SEQ ID NO: 22634 - DNA, 201 bp, Homo sapiens
caggcattctctgaagattagtttcccagactttcagctacaaaagataacttcagaatatctctaaaatggttgttagctcatctgattggcgtgtgaargtaatgaagtcagtagacgtggttctctgtaggtgtgttctaaacacacagacttatccttcatctcagccaaccttccaagtgggccctccactaatgg

SEQ ID NO: 22635 - DNA, 201 bp, Homo sapiens
agtgtgatgtaaattcttaagaaaggataattggcataaacagatattggacttaatcccgttattttgggaaggggacagcttgttttacatcttcctgragatagaatacctcgagttaggtgtggttgtgcattcctatagacccagctactcaggaggctgaggcagaaggattgtttgagttcagaagttcaagac

SEQ ID NO: 22636 - DNA, 201 bp, Homo sapiens
cctcgttgaccaggctgatggtgtgtgccagtgcctaagtcaagtcattgacaacaggaagaagatgagccctggctgagttaaactgaccaggatgtgcwtcccccccatgctggaagtgaggccgtcttccctgagagtcagtatccgaacagaaagatcacccaatgcatgttgtttttaaagtacttatggagatct

SEQ ID NO: 22637 - DNA, 201 bp, Homo sapiens
aaattattataaaataatgtataaaatgacctcaggctatgtgtataaggtgtatatgaaacaaaagaattttgtgtttagacttgggtttcatccccaakatatctcattatgtatatgcaaatattccaaaatctgaaaacaaaaatccgaaacacttctggaccaagcatttcaggtaaaagatgttcaccctgtgcc

SEQ ID NO: 22638 - DNA, 201 bp, Homo sapiens
gctgatggtgtgtgccagtgcctaagtcaagtcattgacaacaggaagaagatgagccctggctgagttaaactgaccaggatgtgcatcccccccatgcyggaagtgaggccgtcttccctgagagtcagtatccgaacagaaagatcacccaatgcatgttgtttttaaagtacttatggagatctctgtgccgtggtg

SEQ ID NO: 22639 - DNA, 201 bp, Homo sapiens
agagccctggcacgctctcccaagagctcatggcattgcctgggatggggccccttttgctgagaggctctgcctaaaggggagatggtgacagccacagscttgcgctccccgccacctacttcctaacccaaggcagcatcaccctttccgacatttgcggcgaagctctttttccctgactttggagttaccccagct

SEQ ID NO: 22640 - DNA, 201 bp, Homo sapiens
gagccctggcacgctctcccaagagctcatggcattgcctgggatggggccccttttgctgagaggctctgcctaaaggggagatggtgacagccacaggsttgcgctccccgccacctacttcctaacccaaggcagcatcaccctttccgacatttgcggcgaagctctttttccctgactttggagttaccccagcta

SEQ ID NO: 22641 - DNA, 201 bp, Homo sapiens
gtgagagagggcacacgaggaagaaccaagccggggctcctcctcgatgctgaggggcatgaagaggggtggcctgaacttggccgcccactgccagccaytcttgaggtggcttttggggcctacttaggttctgcctcagacacacacagaatcaaaactggaaacctagtttttgtgttattaataagccactcccaa

SEQ ID NO: 22642 - DNA, 201 bp, Homo sapiens
ttgtggcccttgttccgggacagattgagatggtgctgttacagaagcaactgtctcgaatttccccaagagcaagggcttgggtgcagatcgcctgtttrggagatgatcacaggcctaagggaatcgggagagtgatgctgagaggagtaagccccatgattctgggctgctgtacactcagggctccgtcccacctct

SEQ ID NO: 22643 - DNA, 201 bp, Homo sapiens
gtattgggcttgtggcccttgttccgggacagattgagatggtgctgttacagaagcaactgtctcgaatttccccaagagcaagggcttgggtgcagatygcctgtttaggagatgatcacaggcctaagggaatcgggagagtgatgctgagaggagtaagccccatgattctgggctgctgtacactcagggctccgt

SEQ ID NO: 22644 - DNA, 201 bp, Homo sapiens
aattaatgtgttagtgtggaagagaccagccttttccccagcctcacatctcatgatcactataagtgggtaacatcaccaggctgaataaagtgaagacrccacatctgcagttgatccacaggaattgaaattccaaatcccttgccagtgcagagaaaagaagagtggtcccagaaagctgaaaagtgacagcaggtg

SEQ ID NO: 22645 - DNA, 201 bp, Homo sapiens
agagttggagcaggactaagaacgaaggatcagtgtgaaaatgtgtgtgtgtgtgtgtgtgtgtgtgtgtatttagtacatattcagagccaagatgttcwctgccaatatgaatagaaaaaaccgccaatctgattctaacattatacagggaatggccagttgaatcaaggaagcctgcatcctttaagagactgtcca

SEQ ID NO: 22646 - DNA, 201 bp, Homo sapiens
tacgtgacagcagagcctcctgagtttcagtagaaagcaacccagggagaactgaggaagaatccatttctgtcacaagtaatgtttacaaaaaaaaatgrtgacctatgtcctgatattggaattctgtttctgagtctcagctgtgttgctggcacctaatggtggcaagtggcaccctggaaccacttggttccacaa

SEQ ID NO: 22647 - DNA, 201 bp, Homo sapiens
catgtagaagacaacctgtgatgattaaataaactatgattctggttcagtgattctaattaatcaccagaagtgaataaaaatgttacttgtggccaggmgcggtggctcatgcctgtaatcccagcactttgggaggctgaagcgggtggatcacctgaggtcaggagttcgagaccagcctggccaacatggcgaaac

SEQ ID NO: 22648 - DNA, 201 bp, Homo sapiens
caacagtggttctacgtgtattacatcaagctgcaaccacccagaagtttgggtgtcgtgtctgtccccccagctctccttttggagttggaaccctgttsccttgcagcagctctccaccttaatttcttcagcttataaccaggcaaaagtaccctgctgcagagtgcacagagatcttggggtccacggtgtttggct

SEQ ID NO: 22649 - DNA, 201 bp, Homo sapiens
gttcgagtacaccttataataccagtgattataaaataccatggactaatagagtgtcttgcttccaaggagtttaaactgttttataattctgccaaccrtaatttatcttcataagctgccgtagagacaagagaaaaagtgagattaataatcacattttatagatggtgaaataaaaactcagagaaattgagtaac

SEQ ID NO: 22650 - DNA, 201 bp, Homo sapiens
tggagtgcagcagtacgatctttgctcactgcgtcactgcagcttccacctcccaggttcaagcgattctcctgcctcagcctcccgagtagctggaactrcaggcacacgcaccacacccgactaatttttgtatttttaatagagacagggtttccccatgttggccaggctggtctcgagctcctgacctcaggtgat

SEQ ID NO: 22651 - DNA, 201 bp, Homo sapiens
gtggaaaatcttcactaatgcaacataaaacttggcgattttcatcacaccaggtcaggtaatcccaggctgtgcttcttgaggcagtggaagctgatttyctttgctcacttatcacctgtgcctctcaatggcatgtctctaacaggaggcagaggcctccttcccgaggtccatgggtcagagttttaccatacgaga

SEQ ID NO: 22652 - DNA, 201 bp, Homo sapiens
tcaagcgattctcctgcctcagcctcccgagtagctggaactgcaggcacacgcaccacacccgactaatttttgtatttttaatagagacagggtttccycatgttggccaggctggtctcgagctcctgacctcaggtgatctgcccgcctcggcctcccaaagtgctgggattacaggcgtgagccaccgtgcctggc

SEQ ID NO: 22653 - DNA, 201 bp, Homo sapiens
gtgcagtggcgccatctcggctcacttcttcaagctccacctcccaggttcatgccattctcctgccttagcctcccaagtagctgggactacaggtgccygctaccacgcccagctaattttttgtatttttagtagagatggggtttcactgtgttagccaggatggtctggatctcctgacctcgtgatccgctctcc

SEQ ID NO: 22654 - DNA, 201 bp, Homo sapiens
tgtcattgatctttgtatgcttgtcacctggtagagccagcacagagacagtgggcagtgtctgtttgaataaggaagaatggaagcgggcagggaggggrgcaggctgtatctgaaacatgtctcatgagtgcagagaaaaggctgcacccttaggggtgggagagggatccagagtggattggaaaaggttaaaaccaa

SEQ ID NO: 22655 - DNA, 201 bp, Homo sapiens
gatcttttttatgtttgcacacttaaccctagtaagccaggagccatctctgaaagaaataataattagcatttcttattagccaaaatagggattcttcrttgttcagtttggtggaaccagtagactcagcagtcagaatttgtttcagtcctttaatcgtagcaggggagaactttaccttttgcttccttgaaagag

SEQ ID NO: 22656 - DNA, 201 bp, Homo sapiens
atggtttgtgtgcatggttggcccagcagaaatatgtttgtccatccatccatccatccatccatccatccatccatccatctatccatccaaccatccawccatccatccctccctccctccctccctccctccctccaaatcattcatcaaataagggaaccttccccaaaggtcccagctgttctctctccccttctt

SEQ ID NO: 22657 - DNA, 201 bp, Homo sapiens
tacttagttatcattctgatttcagaaagaaacaaatggttcaccaagtcttataatatctctaaccccgagacaagcgaggggtgtgaggcagagacacrctatgtcaggctacagcctgcctctcccctggcccacgtcaccttggccgactggactctgaacagtgaagggatagcctagaaggaaggagctgagcca

SEQ ID NO: 22658 - DNA, 201 bp, Homo sapiens
tatttggtgcagtttcacaccgaaaaggggtccctgtgactgatttggccagccctggacaaatgagtgttgtcattgtatcaccagcggctttggctcartgcgtggtataatttaaaaattgcctctttttctagctctacttagttatcattctgatttcagaaagaaacaaatggttcaccaagtcttataatatct

SEQ ID NO: 22659 - DNA, 201 bp, Homo sapiens
gcccttgtgtgtggtcttgtcctcagccacaggggcctaggtgggagtaaaagtgaagtaacacaggcagaattttctggatgctttactaaagagatgcktaatgtgaggctttgtctgccgttccttctctgatcccaaagtatcttcgactggtttagtgctcgatagagatggggtagattaagatacttgaagaaa

SEQ ID NO: 22660 - DNA, 201 bp, Homo sapiens
cgctgggcgttggggagcagggccagcgcctcctggggactgcaccccccagatcccccagccttctgtagctcagcagacaggctctgcttctgtccctsctgcctggctgctgtgggctctggaatttgcccacttccctgctgcctctagggtggtggagatccatcatgggaagagcctggcctggctgtgtggcct

SEQ ID NO: 22661 - DNA, 201 bp, Homo sapiens
aacttaatgaagaaaaataactgagtacaagatacaacacatgaagtgctcaaatcaacaaaggatggcggaaaggaggttactcattacctttctctctwaaaatgcgctccctttttcctgggcaaagtcttcctcagtctggttcttagactaagaatcagtaccatggctgggcacagtggctcacgcctgtaatcc

SEQ ID NO: 22662 - DNA, 201 bp, Homo sapiens
cctggctgctgtgggctctggaatttgcccacttccctgctgcctctagggtggtggagatccatcatgggaagagcctggcctggctgtgtggcctcaarcaagatacccgggaggtggctgtgactctatgaggctctgtaaataccagctgcttctctcatccaattagctggaaactgaccagttgcctaggcaatt

SEQ ID NO: 22663 - DNA, 201 bp, Homo sapiens
ctgcctctagggtggtggagatccatcatgggaagagcctggcctggctgtgtggcctcaaacaagatacccgggaggtggctgtgactctatgaggctcygtaaataccagctgcttctctcatccaattagctggaaactgaccagttgcctaggcaatttttatttcttaaaaataaatgatcaatatataaaaatag

SEQ ID NO: 22664 - DNA, 201 bp, Homo sapiens
ctacagggaaggggtcacaggttatatctgatcttctgccagtgctttctcctttagggatttctttactttttagctccttatttattttcatcattttraaatgatgaaaattatctattgccatgacaacataatgcaattgtgaactctgacagctttgttctttattcagaagtgatgttcttccaaggccatttc

SEQ ID NO: 22665 - DNA, 201 bp, Homo sapiens
aacatttttccagaaatgcacagctccgcctgtgcgctccgattagcgctgcagatttattacccaagttcggagtggcagtgaaccctgcccttgttttrtcagtgaactatgtaaatgagcaagacattgactctggtctcagacttgaccaaagtgtttggggtgagcaagggactataccctgaaccctgcgtccca

SEQ ID NO: 22666 - DNA, 201 bp, Homo sapiens
agaaatgcacagctccgcctgtgcgctccgattagcgctgcagatttattacccaagttcggagtggcagtgaaccctgcccttgttttgtcagtgaactrtgtaaatgagcaagacattgactctggtctcagacttgaccaaagtgtttggggtgagcaagggactataccctgaaccctgcgtcccagcccttgttgc

SEQ ID NO: 22667 - DNA, 201 bp, Homo sapiens
ctaggcaacatagtgagttcccatctctagatagacagaagaaaatagaagacctgcgtttcagaactcctttgtaaaaaccaggcattctctgaagattrgtttcccagactttcagctacaaaagataacttcagaatatctctaaaatggttgttagctcatctgattggcgtgtgaaggtaatgaagtcagtagacg

SEQ ID NO: 22668 - DNA, 201 bp, Homo sapiens
ttttatgtgtgtttctgtttaaacatatatcttagcatatagttttgattaacatcaaactcatgcccaacagcactataactcatgcctgaacgagcttwtctaacacatgcgtttctcataaggcacatcacagtcttcttgtgcttaggagcactaagcagcactttagcactgtgcttggggaccatttaaacagca

SEQ ID NO: 22669 - DNA, 201 bp, Homo sapiens
aggcagagtgtcaccattgtggagctcagctgggaatgtgtgtgttgaccagcgcaacttttttgctgctctgcgcatgcgcaggcatgaccaaaagtgcyctgagtattgactttggggttacaaacaccttttagtgagtaggtgaatttgcaaatgtggaatccaggaataatgacgacagactgtttatcgtgaagc

SEQ ID NO: 22670 - DNA, 201 bp, Homo sapiens
tcacattagaacggagccaggtaagatccgtggcacaggtgttcagcgttggaagggctccctgggacctggggtgcagagcagaagagttccgtcctccyggatgggtaggatccagacaggtggtggagagagagggatgtgccatccacagtccgcagtcacactagtgggaatttacaggagacaagaaggacaccc

SEQ ID NO: 22671 - DNA, 201 bp, Homo sapiens
ttatccacgctgacctcaaaccagaaaacatcatgctggtggatccatctagacaaccatacagagtcaaggtcatcgactttggttcagccagccacgtstccaaggctgtgtgctccacctacttgcagtccagatattacaggtaagaccgtccacaaggagacaggagctgctgaatgcccagtggcactcacagag

SEQ ID NO: 22672 - DNA, 201 bp, Homo sapiens
acgaatgcttccagcacaagaaccacacgtgcttggtcttcgagatgttggagcagaacctctatgactttctgaagcaaaacaagtttagccccttgccyctcaaatacattcgcccagttctccagcaggtagccacagccctgatgaaactcaaaagcctaggtcttatccacgctgacctcaaaccagaaaacatca

SEQ ID NO: 22673 - DNA, 201 bp, Homo sapiens
cacacctggctaattttttttgttttttgtagagacaggatttcaccatgttgcccaggttggtcttgaacttctgggctcaagcagtccacccatcgcggcctcccaaagcattggaattacaggtgtgagccactgaacctggctccaattctcttttataccaaagtgactacagttgctcctcagtagattgagaga

SEQ ID NO: 22674 - DNA, 201 bp, Homo sapiens
acccccgaaccatcatcgtgccacccctgaaaacccaggccagcgaagtattggtggagtgtgatagcctggtgccaggtaatttggggccaggacagggmaggaacctctccctggagagtggttttcctgcttttctgctgctagaaatgttgctgtatgggagctagtacaatagaaagtgcccagtgactgcaggcg

SEQ ID NO: 22675 - DNA, 201 bp, Homo sapiens
actttttgtatttcggtagagatggggtttcaccgcgttagccaggctggtctcgaactcctgagttcaggcaatccacccgcctcagcctcccaaagtgmtgggattacaggcataagccaccatgcccggccaagacacctttttttgagcctcagctttaaccaggagacagagttcaataatgacaccaacaatagc

SEQ ID NO: 22676 - DNA, 201 bp, Homo sapiens
aaacattttacctgattcgtcctttgaacacccctactttgggcaccttcctcaaatgtggactgctttagagttggggctctgtggaacaatagcaccgyattttggcgaatgactggattccctggccaaagctctttcccatactcagttatttcatctttcctctcctagggcttccttacgcttttcagtgtcacc

SEQ ID NO: 22677 - DNA, 201 bp, Homo sapiens
attgtcaaagggtgattctgagacagacactctgcgaacaggtatatctggtgtgaagttttctccctgggacttgagtgctgcattcaatcctgctggtmtcacttttcccctagagctttggaactttgctggtaacattttcacatgaggaagtggaggtaaagtttgcttgaggaggcatttcagcacccctcttaa

SEQ ID NO: 22678 - DNA, 201 bp, Homo sapiens
caagtaatcctccaccttagcctcccgagtagctgagactacaggcatgagccaccacacccagctaattttcaaaattttttgtagagatgttgtgagakccaataattttgagaacaagattttacagtgagtaagaaagcaactgctgctcaaagagagtgtcctggccgggtgcggtggctcacgcctgtagtccca

SEQ ID NO: 22679 - DNA, 201 bp, Homo sapiens
cagctaattttcaaaattttttgtagagatgttgtgagagccaataattttgagaacaagattttacagtgagtaagaaagcaactgctgctcaaagagaktgtcctggccgggtgcggtggctcacgcctgtagtcccagcttctcgggagcccaaggcggggggatcattctaggccaggagttcaaggctacagtgag

SEQ ID NO: 22680 - DNA, 201 bp, Homo sapiens
tcatagggtgactgtaacaaattaacacaaactattaataggtggcctaaaacaacagaaatgtcttctctcacagttttggaggagttggcagggccacrttccctcgaagactccaggtaaatccccttcttgccttctctcggcttctgatggctcccaacaatgctgggcatcccttgggttacagctgcattgctc

SEQ ID NO: 22681 - DNA, 201 bp, Homo sapiens
gccatctggtctctgccgccgttactgaagttgtagagtgaaagctgcacagacaatacatacacgagtcacgtggtgggaggggcgtgtgggggggggggcgtgttccggcaaaatcttactcctaaaagcagacttgggtttgaatttggtgtccagtctgtagtttggatccctgtagctagcctaagccaccataat

SEQ ID NO: 22682 - DNA, 201 bp, Homo sapiens
ttattttttaaacagaaaaaaaaaaacctttaggctaagtaggaatgggatgagatttttaccaggaactgagattcaggccctttttggtttatttgtaygtgggacctagcattgttagagatgccaggtagaatgagagtatctttgagagctgtgtttgtgtcgtcgccataggagctgattttataaatcctgaca

SEQ ID NO: 22683 - DNA, 201 bp, Homo sapiens
agtagtcgtgcagttccggtgaggcctaaccctccgttctgagccgcccactgtgatggtcactttgatgacgaggaccacggctccctgggaatcggccygcaagcagcctgctcctctaatgatggaacacttatggctgctggcagtgggagacagtatgaatattaataaactatatttcacttttagtactttttc

SEQ ID NO: 22684 - DNA, 201 bp, Homo sapiens
aggctttgcaggccatctggtctctgccgccgttactgaagttgtagagtgaaagctgcacagacaatacatacacgagtcacgtggtgggaggggcgtgkgggggggggggcgtgttccggcaaaatcttactcctaaaagcagacttgggtttgaatttggtgtccagtctgtagtttggatccctgtagctagcctaa

SEQ ID NO: 22685 - DNA, 201 bp, Homo sapiens
gaatcggcctgcaagcagcctgctcctctaatgatggaacacttatggctgctggcagtgggagacagtatgaatattaataaactatatttcacttttaktactttttcatggagatggtgtttgtgagtgaagtccgtgcactgagctacagacaggcgttttgttttcttgacaaaatggcgaacctcgcagccagag

SEQ ID NO: 22686 - DNA, 201 bp, Homo sapiens
gcagacccttcagacttaacctttcttgatgatttattgaataggaaaaaaagtatatttctgcttttgcagttccaagtttcttctcggtttagaatcartcacttcaaggaaagactgcactctttatgcatgtggaagtggcttgtttttagagttggattatcactcctttcatgtgttcagtttgcagcaagcatt

SEQ ID NO: 22687 - DNA, 201 bp, Homo sapiens
actgtagtgtagtctttgtgtgcaatcatttgtacttacctcatttgtatgctatatcatgtctaaaaaattgcacatacttaattttaaaatactagagytaattttaaaatgctagagctaggcttgcacctttaatcccagctacttgggaggctgaagcagaagaattgcttgtagtgatgagttgagaccagtctg

SEQ ID NO: 22688 - DNA, 201 bp, Homo sapiens
gaagaattgcttgtagtgatgagttgagaccagtctggccaacatagcaagacatcatttttaaataaataaatgaatgaatgaatgaataaaatacttcrttgctaaaaatgctagtgatcttctgggccttcagtgagtcataatctttttgctggttggagggtcttacctcgatgtcaatcgttgctgactgatcag

SEQ ID NO: 22689 - DNA, 201 bp, Homo sapiens
taagttgagaaaagcagcaaaggcatgccaggtaaaggaatagtgtaagagtgtgaagataggaagtataagagacattctagaaacagcgaatagaccarcttcattcaagttaaggacccaggaaggttagtagagctggagctaacaaggtagttggaatcaacatgtaaatgtatcgagttctcagctttatctcct

SEQ ID NO: 22690 - DNA, 201 bp, Homo sapiens
tggtctggaaagagaaggaatctaagctggctggtctttggataagttgagaaaagcagcaaaggcatgccaggtaaaggaatagtgtaagagtgtgaagrtaggaagtataagagacattctagaaacagcgaatagaccagcttcattcaagttaaggacccaggaaggttagtagagctggagctaacaaggtagttg

SEQ ID NO: 22691 - DNA, 201 bp, Homo sapiens
ggcatttatgtggtctcatgctcatctctatttgccagataccatccgtgtaagaaccatgctcaacagatacattttggagaaccagatgtctcattttstcattcaccaatgagtcttgaaaggctgaattcaagaagacaactttttaagatctttctctctcagtctacaaaagaaaaaacgggcttattactgtca

SEQ ID NO: 22692 - DNA, 201 bp, Homo sapiens
cagtgggaagaaacgggtgaagtacggattctgaataagcaagccagaatagtcttgtcaggcacgaggattcctacagacgtgcagtcacagtgcgtagrtggaggtcggagctcaggattgaagcaagaagggaacaccctccagcagatccatgggcccagggtggaggtggggctccaatcaggtgctggatgttag

SEQ ID NO: 22693 - DNA, 201 bp, Homo sapiens
cccaagtccagtagtccccctggtctctcacctagaaggagtaaaatccgccttctctttcaagagccaactaggaagtgcagagataacttaaaaagcasttgagattttgccattggatcaaactgacaatgtgcattaagcctctgtttttcctgaaaaggatattgacaaatgaggcgggaagtagccttgactagt

SEQ ID NO: 22694 - DNA, 201 bp, Homo sapiens
cgtgatctcagctcactgcaacctctacctcccaggttcaagtgattcttgtgcctcagcccaccgaatagctgggactacagacaaggcacgtgccaccrtgcccggctaatttttttgtattttagtagagacggggtttcaccatattggccaggctggtctcgaactctagacctcaggtgatccgcccacctctgc

SEQ ID NO: 22695 - DNA, 201 bp, Homo sapiens
ggttatggcagatttatcctaccgtgacctcctgggttcctcttactgctccccatgggctcgaaacttgccctcccaagtccagtagtccccctggtctstcacctagaaggagtaaaatccgccttctctttcaagagccaactaggaagtgcagagataacttaaaaagcagttgagattttgccattggatcaaact

SEQ ID NO: 22696 - DNA, 201 bp, Homo sapiens
ctgggtccactgtgctggtggatagctttctgttcatgacaatcacgtctgatgagcttggcagtgatttgtatgatgacagtgaccgtccagcagtatgytaaggagtctgggtcaggagggactttcttcatttgtttttgccacatcacccagagaacatccctgtaaaagaaggcggtttgatgaacttggaggaac

SEQ ID NO: 22697 - DNA, 201 bp, Homo sapiens
cttctaaatgtatttataaatcatgaaaacattctctgctcatgggatacttctcttaaagaacctgcatgggatatctagaatcaaatattcccttcccmcctcgacagtgaaaaacctatgacttacttctagacttcactaagattagtgtcaattatctttgtaacatcatctctctttatttaggtatgacatatc

SEQ ID NO: 22698 - DNA, 201 bp, Homo sapiens
tgtctctccagaagagaaagagggaatggctattaggaaggcaacttacagtgtctgcttcaacatgttcatttttttttaaatgtttcactctgattgtwgtgttttttaactatactattctctaaatttggctgtgtttactatggtaattattttaattaagttctatttgattatttgtaattcaccttgttttac

SEQ ID NO: 22699 - DNA, 201 bp, Homo sapiens
tgttacatctcttaggtctttttgtatgcatagatgtgtgcacatttttttaaccaaaatgatgtattactgttttattatctgatttttttggatgacastctccaactttgtatttcaataaagttcatctcgtttaataccttgtttctattccgatttccataactggccctcaaatacccttcaaggctggtttgt

SEQ ID NO: 22700 - DNA, 201 bp, Homo sapiens
atagagctaaaagcagtgatttcatgtaagtgtttcatttgtccccctccagctcgcctctctcctaggagtcacgaactcaagtgcctccagggccaggyaggtggtcagtgagctggtaatgactaaggtctgcatctggtgacacacacgtgcagagggcagccttatccagccccaggtcattgtgaccacgaactg

SEQ ID NO: 22701 - DNA, 201 bp, Homo sapiens
tcaaggcctaacatgaaaatgcaactcagcaaatgttattccctggaaggccaaaataacaggtctgagtacttcttcttatccttctactggtttgatgsaacacaaagacccaaaacactcagcagaactgccagtctacgtgcctatcagacaaccttcaagactattacttttttttaactggcgtgttcacgcatg

SEQ ID NO: 22702 - DNA, 201 bp, Homo sapiens
aaatgtcctgtggtatacatgataggcgaattcagctgtggtcatgcaaattgtatttgagtttggttgaggctctaattaaaaacaacaacaacaacaamaaaaaattggttgtttttacttttcttagttgcctactgtgttctatttgaaaccctataggctttgccattttccccaagggtgcctacttcctactct

SEQ ID NO: 22703 - DNA, 201 bp, Homo sapiens
tgtggtatacatgataggcgaattcagctgtggtcatgcaaattgtatttgagtttggttgaggctctaattaaaaacaacaacaacaacaacaaaaaatkggttgtttttacttttcttagttgcctactgtgttctatttgaaaccctataggctttgccattttccccaagggtgcctacttcctactctttccttta

SEQ ID NO: 22704 - DNA, 201 bp, Homo sapiens
gagaggcaaggctgaggatgagaaccaagggaaggcccctgagtcccaaaagcagcttggtggtgatgtgtgagtgcagcctttccagcttccctggcacragtctcctcatccatggttaaatgatcatccaattatcatataggcctcctgacttgcctccccaccctgagccttcttgaccctaattcattctccagt

SEQ ID NO: 22705 - DNA, 201 bp, Homo sapiens
tggttcctaccaggctgtcagagccacttcctttttccccagaggcatacggaagctcctgagttctggttctcgtggtccccttgcagcccacagtgctrcactgagcccctcctgcagggagtgtttccctctgtcccaaggaaagcaaggccacagtgccctcagtggttccttgtgtttccctgagaaagttcacag

SEQ ID NO: 22706 - DNA, 201 bp, Homo sapiens
tcatcacaccaggtcaggtaatcccaggctgtgcttcttgaggcagtggaagctgatttcctttgctcacttatcacctgtgcctctcaatggcatgtctstaacaggaggcagaggcctccttcccgaggtccatgggtcagagttttaccatacgagatggcggtgtgggaggtgtgatttgtcccataagatctctaa

SEQ ID NO: 22707 - DNA, 201 bp, Homo sapiens
aatttttaacttaactgtttaatctgttctttaactctgtgtttctaaataatatgcttagactgctttttatggatttttttttccattttaggtattayccattgacttcctattatggaagatgaagatttagctttctaacccactgccatccccataacacacacaatttctctcctgttcctcctttcactcact

SEQ ID NO: 22708 - DNA, 201 bp, Homo sapiens
tagcacgtttgtgggtaacaccctttggaagaataaagaagatctcagtagaggtcagaagccaagctaaacatataacagttggtgagaataatgtagtyttagcaagtgtattttaataatcaattaatgtgaaaaacctgaaataatattaaaagactctgggaggagggaaaggctttgggggagatagttatgtaa

SEQ ID NO: 22709 - DNA, 201 bp, Homo sapiens
attgtcattcccgacactcccagccccacggtcagcgtcatcaccatcagcagtgacacggacgaggaggaggaacagaaacacgcccccaccaggtgagrcagtgccaccttagccttccaggaaggagccgggagggtttgcattgtgtgcagatctgaccatcttccatcatcaaacataaggatccctctcttctga

SEQ ID NO: 22710 - DNA, 201 bp, Homo sapiens
gaaaattttcttctgattcccacactgtttttgtttcctctttcttttgtttgcttattttattctctttcaggttagaggcttcctttactgtctggtgwtcattagctattcattcctatttaagactaaagcactaaaaaactaattggaaacctggagggtaggggagagactattgaatgtgggcttctctataga

SEQ ID NO: 22711 - DNA, 201 bp, Homo sapiens
ctgcatctgtttccagaactctaccctgcccaactcatgatttcctcacagatgcgctcctctgttatttttatggctagatacccttgtaccttcccccraacaccaccacaatggccccttcaccagtgcagagccagatggcaaccctccaagttgtccccaactcctcatggccctattgggctatctctcattctg

SEQ ID NO: 22712 - DNA, 201 bp, Homo sapiens
gttgtccccaactcctcatggccctattgggctatctctcattctgcacgaatatcaggacaggtcactcccctcaaccccctgacagcctccatatcacmcagggaacctcccacagttcttattctgacctacaaggctattgtgaattaagatctctccgagaaaagaagaaaggtggtgatataagcccccagtcag

SEQ ID NO: 22713 - DNA, 201 bp, Homo sapiens
ccagttgcctaggcaatttttatttcttaaaaataaatgatcaatatataaaaatagatgcacattcattttaaagtcttaaataagcacacaataaacaataaatttcacatccatcatgccagcagcctctcactgagtttgaagacaaacagaagtagttcccaaagtaaccacactaacttaaatatctctgaacaa

SEQ ID NO: 22714 - DNA, 201 bp, Homo sapiens
gtaagaacccttagcctcccaacctgtttagcaagtccctcctttttgtttactcaccacccagctgacttcatgaagcctcattgccagtacatttcaaratcgatataattatagtgaaaggtatgtatttgcttatttttaagaccaatgccttagcaaaacagtctgaaagaccagaagtctctcccttgttggtga

SEQ ID NO: 22715 - DNA, 201 bp, Homo sapiens
aacccaggaggcagaggttgcagtgagccgagatcgcaccactgcactccagcctgggcaacagactgagactccatctcaaaaaaaaaaaaaaaaaaaaagaagccataatatgagtttctaaagtccatgtaaatgcccaaaaggcgctatcaaaatccctacaaaagtgttcatctacttcttttttcctgttcatcc

SEQ ID NO: 22716 - DNA, 201 bp, Homo sapiens
tcagtctgaatcatctaatgaccaaagacaagcagaatagtgatcatggattaaaagagcttaaaacacaacatacacacacacacacacacacacacacmccagtgaatctatcaaggaagaatcacaaacgttcattttagatttcttagaaaaattaggttcaagcagtgacttccgcctctctctcatttttgcttt

SEQ ID NO: 22717 - DNA, 201 bp, Homo sapiens
aaaagcaatgggaactcattaaatgattcttcagcaagggaatagctggttagatctgtgttgagcaaagatctgtctgctgccacacaagtcaaatgagtctggaaaaaaatgtccattcggtttaacaactcacaagttgtcagtaacgcagtggcagccattcagtggagtggtaaaagcagaaaccagtttaccagg

SEQ ID NO: 22718 - DNA, 201 bp, Homo sapiens
tctcttttgctgaatgttgctccgttccaaaggcactgtaggagagtccctgttcttggactacaaagaggccccattgttaggataagaaaactggttawtgagaagatggagcagtggtatcctcatctgaaaactttcttttctttctttccttttttttttttttttttttaagacaaggtcttactctgtcaccca

SEQ ID NO: 22719 - DNA, 201 bp, Homo sapiens
aaaaagcaatgggaactcattaaatgattcttcagcaagggaatagctggttagatctgtgttgagcaaagatctgtctgctgccacacaagtcaaatgagtctggaaaaaaatgtccattcggtttaacaactcacaagttgtcagtaacgcagtggcagccattcagtggagtggtaaaagcagaaaccagtttaccag

SEQ ID NO: 22720 - DNA, 201 bp, Homo sapiens
tccaaaaagcaatgggaactcattaaatgattcttcagcaagggaatagctggttagatctgtgttgagcaaagatctgtctgctgccacacaagtcaaatgagtctggaaaaaaatgtccattcggtttaacaactcacaagttgtcagtaacgcagtggcagccattcagtggagtggtaaaagcagaaaccagtttac

SEQ ID NO: 22721 - DNA, 201 bp, Homo sapiens
aagaaaacctaggcaataccattcaggacataggcatggcaaagacttcatgactaaaacaccaaaagcaatggcaacaaaagccaaaattgacaaatggratctaattaaactaaagagcttctgcacagcaaaagaaactatcatcacagtgagcaggcaacctacagaatgggagaaaaattttgcaatctatccatc

SEQ ID NO: 22722 - DNA, 201 bp, Homo sapiens
taaagttgtatctttacctagacttcttttttcagctccagagtcataaagccatcaagctactggacctctctctttggatatctcatccttaacacatycaaaggaaacatcttggtcaaccccctgaaatatactgctgttctggaattctttatttccataaatggcaccttctgtcacccagtagttcacatcaga

SEQ ID NO: 22723 - DNA, 201 bp, Homo sapiens
tatgggggttagggagggcaaaagccctgttcctgccctctcccctctgcctccctcccctgccccagggcatgaagtgctagttgggtgtctcacctcayggccttctcccacctctgacttctccctttgcattttcagcactgtctccaagcaaagaaaaaacgtcatcagctgtgtcacagtccacgactcccccta

SEQ ID NO: 22724 - DNA, 201 bp, Homo sapiens
gcctctcctgagagccacaggcccttcagaggaggagtcagtaatggcaccccaggtttgaaagatagtattcatatagaaacagcttcctgcatttccarcttgctaatggtttcttccattcttccttttcagggcccctgagatcatccttggtttaccattttgtgaggcaattgacatgtggtccctgggctgtgt

SEQ ID NO: 22725 - DNA, 201 bp, Homo sapiens
gttaggtaaagggattaatccagagaaagagattttaaggctgcatcattgattttattgttttggataagaacgtggaattggcttttctgtaaattgastacattatataaggcacaggttaaagtgatccttccacgtgaattctttcatggttatttgattattttcagaatatcttgacatttgaaaggcatacag

SEQ ID NO: 22726 - DNA, 201 bp, Homo sapiens
ctcctgagagccacaggcccttcagaggaggagtcagtaatggcaccccaggtttgaaagatagtattcatatagaaacagcttcctgcatttccaacttrctaatggtttcttccattcttccttttcagggcccctgagatcatccttggtttaccattttgtgaggcaattgacatgtggtccctgggctgtgttatt

SEQ ID NO: 22727 - DNA, 201 bp, Homo sapiens
ggtcagagttttaccatacgagatggcggtgtgggaggtgtgatttgtcccataagatctctaaatcccaccacccattctgtaacagttgatagtcctcrgcactgcattttccagttactcatgtttacagacaaatgtctctttgtctgtagttgctctctgaagaaatcaaagagcagctgttgtcctgcctcagca

SEQ ID NO: 22728 - DNA, 201 bp, Homo sapiens
aaagtgagactccagcattgcagttcctctccacggaggtcttatataacgaagacctccataaacaaacattgcagaaacataacatcggatctctcctmttaaagttcacactgtgtaatgtaaagtggaataatcattttacattccttgtaagttctaagaagtcccttctggggcagctgtttgctaaaccttttt

SEQ ID NO: 22729 - DNA, 201 bp, Homo sapiens
ctgatgagaagggtggggggcgttgctcggtaggaagtgatggaacctaagctctggcttgcagaatagaatcgttttaaccggacgtgaaggtgcaagcmggaatgatgctcactcccatgtaagctattgatgctatcccggggggataaagtaacaaggctggggactgtgtgccgtattcccttcatcagcctttcc

SEQ ID NO: 22730 - DNA, 201 bp, Homo sapiens
gtaggtaaatagtatctcctttatcacctgcttttcacccactattcctcagcatatatatagatatctagatagatagatatagatagatgatagatagwtacaaactccctatgtcaagcttctcctattaaaaagtggagctttataggtttctattcacatttcaccattgaaatccttattatcagagaagaacta

SEQ ID NO: 22731 - DNA, 201 bp, Homo sapiens
ctccacagtaactctcaggcttcttgaggtcagaaccatgcattcttgttttgctgccacctccccacctgcctgcccctcatgctgtgtcgagtccgcaygtgagaaataagatgagagtcactggcagcaaagtgagtgctgacatttaaatatggaagcaagtctggggccccagactccaagcgcctagtacctgtg

SEQ ID NO: 22732 - DNA, 201 bp, Homo sapiens
cacagtgcttggcggtaggaaagaagataatgaaaccacagcttcttccagctcatgagtgtgaacaatgacacccaatgtctgcagacaccgaccctctyaccccagtagacaaggctgtacgctgggtgctgtgaggtgtacagagatcagtcatgcacaggccatggcctcgggatgcttccagtctaggagctgatt

SEQ ID NO: 22733 - DNA, 201 bp, Homo sapiens
ttcttgttttgctgccacctccccacctgcctgcccctcatgctgtgtcgagtccgcacgtgagaaataagatgagagtcactggcagcaaagtgagtgcygacatttaaatatggaagcaagtctggggccccagactccaagcgcctagtacctgtggccttgctcactgtttttcatatgctgtcctctggtcttgtt

SEQ ID NO: 22734 - DNA, 201 bp, Homo sapiens
ttcatatgctgtcctctggtcttgtttgtaaagtgacctgttgcacaacctgtcagtaccctgaaggtcagtgactgtgtccacacctctttgtgttctcrgtggttagcataatatttttaacataacggactctttttaaatgtttggtgatgacacagtcactgagcaggatgtgctgtaagaagaaaacatactctc

SEQ ID NO: 22735 - DNA, 201 bp, Homo sapiens
cagtcatgcacaggccatggcctcgggatgcttccagtctaggagctgattatagatgattcttatttaaaaaaaaaaaaaaaaactatcagtgcaaggaygagtgaaagagctgaattggcagtagagacatagttagcgttgtaggaatagagcacaggagggagcctcagtcagcagggagtgctagagcaggtaagg

SEQ ID NO: 22736 - DNA, 201 bp, Homo sapiens
agtgacctgttgcacaacctgtcagtaccctgaaggtcagtgactgtgtccacacctctttgtgttctcagtggttagcataatatttttaacataacggrctctttttaaatgtttggtgatgacacagtcactgagcaggatgtgctgtaagaagaaaacatactctccctcattctgtgaattagtcagaatatatca

SEQ ID NO: 22737 - DNA, 201 bp, Homo sapiens
gagcagtgatgctgcaggtggacctgatgtgagaatgcagtgtgagcagtcagttttgttgtgatatatagaacctatatggagaaagggtagtagggcaytggagaaaattcatctgaataaccgtgcctgttgcaaatgcacaggctttgcacaagcaatccaagaaacttagacctaaagtttagtttccctgcttgt

SEQ ID NO: 22738 - DNA, 201 bp, Homo sapiens
ggctctggggccctgtaacatttgcgcgtgtacctgggggaaggggtgctgcatcggcccgccccccgcagccacccgccgcagcagtggtcaccgagtcrgggtgtggggaggtggaaatgaaatgcataattcataggccgctgtggtgtccagtctgtgggaggggtggtaattacagaactgagaaatgaggctgca

SEQ ID NO: 22739 - DNA, 201 bp, Homo sapiens
ttagggtgaaagagctgttgggagtccgaaaactaaccttgcccagccctaaggctaaagcatccatagccagacctgtgagcttcttgacaaaaatcagsatggttttgttcattacctccttgaagacatttgtttctcccaccagccctcatgaggcacctggtcttaactccctaaccccaaactacctgtccccat

SEQ ID NO: 22740 - DNA, 201 bp, Homo sapiens
atccaaaaagcaatgggaactcattaaatgattcttcagcaagggaatagctggttagatctgtgttgagcaaagatctgtctgctgccacacaagtcaaatgagtctggaaaaaaatgtccattcggtttaacaactcacaagttgtcagtaacgcagtggcagccattcagtggagtggtaaaagcagaaaccagttta

SEQ ID NO: 22741 - DNA, 201 bp, Homo sapiens
tccctgattccataagctggttagctcagttggctggagtagtgtttggggctcacgagaacaaaatgagcattctcatctcttttgctgaatgttgctcygttccaaaggcactgtaggagagtccctgttcttggactacaaagaggccccattgttaggataagaaaactggttaatgagaagatggagcagtggtat

SEQ ID NO: 22742 - DNA, 201 bp, Homo sapiens
gaccagacgcggggtggggggccaccgccatcttgctggtgatatgacagccagcatatccactccaaagggtgtcgcaaagactctgcaaaactaaaagkgttgctcatcaaaaggcagttgtcaaataagaacacccgtcttctccacggcactgagaccatccagatctggcttgggactggggtgaagtaggagtag

SEQ ID NO: 22743 - DNA, 201 bp, Homo sapiens
gatccaaaaagcaatgggaactcattaaatgattcttcagcaagggaatagctggttagatctgtgttgagcaaagatctgtctgctgccacacaagtcaaatgagtctggaaaaaaatgtccattcggtttaacaactcacaagttgtcagtaacgcagtggcagccattcagtggagtggtaaaagcagaaaccagttt

SEQ ID NO: 22744 - DNA, 201 bp, Homo sapiens
aagtaggagtagctggtaacttagtgtgatgcttgggccagagtcgtgggtaagggaaaatgacatcccacaaaagcaaagggtccaagaacaggatttcygttctcttgcattggattctactactccctacttttgaatacatcaggaaaaaaaaattactcaggacacacctagccttaagcactaaggcatgctttc

SEQ ID NO: 22745 - DNA, 201 bp, Homo sapiens
ctgtaggtggaggacgggcacactcaggcccttccacttccctctaaaggttaaatacatgcatacatacatacatacatacatacatacatacatacathgacttttttgtatcttatttgtactgcttggccgtgactcttttttaaaaattgtggcaaacacacacatagcataaaatttatcatcttagcctttgtt

SEQ ID NO: 22746 - DNA, 201 bp, Homo sapiens
ctggtaacttagtgtgatgcttgggccagagtcgtgggtaagggaaaatgacatcccacaaaagcaaagggtccaagaacaggatttctgttctcttgcaytggattctactactccctacttttgaatacatcaggaaaaaaaaattactcaggacacacctagccttaagcactaaggcatgctttccctccactgata

SEQ ID NO: 22747 - DNA, 201 bp, Homo sapiens
cctagcaattaaaatcaaagtattttcctggtaaaaagaaaataataaagtcttaaatatgtttcattttaggtatttctttttttgcagcagggtgggtrggtgtttgttttgttgttgttttggatttgtttttttaatggaatctgcagccaaatcctaatatggtttaaagataatatatatccagtagtcacaaaa

SEQ ID NO: 22748 - DNA, 201 bp, Homo sapiens
gatgtgaacttgaaaggcccaaactcgcaagagttccatttcatatagctattctcttttgggggaaaaaagaaaagaaaaacctacagtataggcagatstttatttttcctataaaagaaacccagatgcttgagggtcacggtgatcactgtgacttaggccatattgactttgtgctgtgcaccgccctgcgccctt

SEQ ID NO: 22749 - DNA, 201 bp, Homo sapiens
catgtgatttcgcatgctgcagtgggactgcgcaggataaagtcttcaacataagagctaaggtggaggctctagagggcgtaatgacaatggccataaaataagaggtttgggctaaatccctgaggtcccaagtcctaaccctgcatgagccaggtgccacttctagccctcctgttcctcctccctgtcatttttgct

SEQ ID NO: 22750 - DNA, 201 bp, Homo sapiens
agagcatgtgatttcgcatgctgcagtgggactgcgcaggataaagtcttcaacataagagctaaggtggaggctctagagggcgtaatgacaatggccataaaataagaggtttgggctaaatccctgaggtcccaagtcctaaccctgcatgagccaggtgccacttctagccctcctgttcctcctccctgtcatttt

SEQ ID NO: 22751 - DNA, 201 bp, Homo sapiens
ccagtgggtgctcagttagtatttattggaccaatctggtctgagtatgtcattgatctttgtatgcttgtcacctggtagagccagcacagagacagtgrgcagtgtctgtttgaataaggaagaatggaagcgggcagggaggggagcaggctgtatctgaaacatgtctcatgagtgcagagaaaaggctgcaccctt

SEQ ID NO: 22752 - DNA, 201 bp, Homo sapiens
acatgtatcccagaacttaaagtataatttaaaaaaaataatagaaaagtggcttcatgtagctgttagcttagcttgctctcttgaccttctgccttccrctgtgtgagggctcagcaagaaggccctccccagacaccaaatgccggcaccttgatcttgaacttcccagccaccagaactgtgagaaataaactttat

SEQ ID NO: 22753 - DNA, 201 bp, Homo sapiens
tcatccttggtttaccattttgtgaggcaattgacatgtggtccctgggctgtgttattgcagaattgttcctgggttggccgttatatccaggagcttcrgagtatgatcaggtgggtccagatgacacagatattcacaagacctcattcttcatctggaaaatagcctggattagcatttcattgattacatgacaaa

SEQ ID NO: 22754 - DNA, 201 bp, Homo sapiens
ctaaacacttgcactggggactaagtttctaacacaagaactttggggaacacattcaaattatagcagatctctcctacccattttccagatgctgaaartaacacctcccagaggaacggcactgggcctggccttaggccaccagcccaccttgcctctcctgattcttttccgctttcccttgcttcattccctcat

SEQ ID NO: 22755 - DNA, 201 bp, Homo sapiens
tgtgggttcatgcaaatcaattatgtgattagcaaacatggtcattgcacatgtcctgtgttctacagcaggcttggccaagtgggacccagcagatcctrcttcccccagcatggcagcaactgactggagtggccacccacacatcagtgcagcatgccaccgtgattcccgagaccatggcaggcacccagcagctgg

SEQ ID NO: 22756 - DNA, 201 bp, Homo sapiens
acttggcattcttcccacttgaaagtcctctttctcactcacagccagttatgtttcacctactccttatgagtagaagaaacccacccgttgagcacacrtggccaggctcatcccttcagcagctgcacagctagtgagataaccaactgcagtcagcgtttaattggggaggaagcttgatcttatagaggagctcta

SEQ ID NO: 22757 - DNA, 201 bp, Homo sapiens
gtcttgcctgcatttgggtgcttggaagtcctcctcaggctgtgttttccttgtgcctcctacctttttagaaagtgcttcattggttcccatcagggcarggcaggggctggatggaggacctagtgatgtgttgggtatcagggggtgctgacctaaggcttgttggaaacacaaatccagagcttctctgcgtgctcc

SEQ ID NO: 22758 - DNA, 201 bp, Homo sapiens
tcttcccacttgaaagtcctctttctcactcacagccagttatgtttcacctactccttatgagtagaagaaacccacccgttgagcacacatggccaggytcatcccttcagcagctgcacagctagtgagataaccaactgcagtcagcgtttaattggggaggaagcttgatcttatagaggagctctacttttagaa

SEQ ID NO: 22759 - DNA, 201 bp, Homo sapiens
gagacatgaagtgagcacatgcttttggaaaaatggtactgatagaccggctcgatgcacggttgccacaaaccttcaatttgtgtaaaaaaaaaaaaaccatggtatctgcaaagctcagtcaagctaggggcaatataatgaggtatgtctctctatatatatgcccctccccaaattccaagcccattcagtatttaa

SEQ ID NO: 22760 - DNA, 201 bp, Homo sapiens
agataaccaactgcagtcagcgtttaattggggaggaagcttgatcttatagaggagctctacttttagaacacctctaaggcaccttgttgtcccggttscctttcagaaatacgcatgctcacggaagccattataatcccatcatgcagcagcctgcactattgaccggtcatgtgacccttccagcagcacagccct

SEQ ID NO: 22761 - DNA, 201 bp, Homo sapiens
cagagacatgaagtgagcacatgcttttggaaaaatggtactgatagaccggctcgatgcacggttgccacaaaccttcaatttgtgtaaaaaaaaaaaawccatggtatctgcaaagctcagtcaagctaggggcaatataatgaggtatgtctctctatatatatgcccctccccaaattccaagcccattcagtattt

SEQ ID NO: 22762 - DNA, 201 bp, Homo sapiens
aacacctctaaggcaccttgttgtcccggttgcctttcagaaatacgcatgctcacggaagccattataatcccatcatgcagcagcctgcactattgacsggtcatgtgacccttccagcagcacagcccttaaatgtgggtgtggcccacgtgatgcggcagcagccaaccagcaccacctcctcccggaagagtaagc

SEQ ID NO: 22763 - DNA, 201 bp, Homo sapiens
attaatcttgtacatctccatcagagatcctgggtgactaggtacattgtcaatgagcagtcatatcttgaaagaaatgtttttgttctgagaagtaggtytcaacaatgggcttaaaatattcagtaaaccaggctttaaacagatgtcctgtcatctaggctttgcagttccatttataaagcacaggcaaagtagatt

SEQ ID NO: 22764 - DNA, 201 bp, Homo sapiens
gcccttaaatgtgggtgtggcccacgtgatgcggcagcagccaaccagcaccacctcctcccggaagagtaagcagcaccagtcatctgtgaggtaggtgrtgagagccaccctagggaagagaaatcccaggggatgtgagtgctaaagaaatgtagtttagggagtatcagcacccactctgaacatgggacagttgca

SEQ ID NO: 22765 - DNA, 201 bp, Homo sapiens
gtgttagcaggcatgaaatcacattaatcttgtacatctccatcagagatcctgggtgactaggtacattgtcaatgagcagtcatatcttgaaagaaatstttttgttctgagaagtaggtctcaacaatgggcttaaaatattcagtaaaccaggctttaaacagatgtcctgtcatctaggctttgcagttccattta

SEQ ID NO: 22766 - DNA, 201 bp, Homo sapiens
ttttcatgagctctgaaatgagttccaattggctaagtcagtagaaaccttactgcaaacgaaattgttatttatttaatatttggaatttgcaactgttktaatcaattaaattatgtttccgctttctgtgagttaagtaaacctgaaatacaattaactgtagttaatagcgttggtagagttgcttctttcatttta

SEQ ID NO: 22767 - DNA, 201 bp, Homo sapiens
ggcacatgtttcttcctggaagaccactgttctctggtggggtagcatcttctgggcagctgggaccctgccactgatctgacctctttctcctcccgccrcagtcaacaccagtcaccactcgtcctcctacaagtccaagtcctccagcaacgtgacctccaccagcggtcactcttcagggagctcatctggagccat

SEQ ID NO: 22768 - DNA, 201 bp, Homo sapiens
cgaggacaacactaagccgttcatgagggatctgtccccatgacccaaatacctcccattagttcccacctccaacactggagatcacatttcaacataagattggagggggacaaacatcaaaactgtagcatagggaagccagcatctgtccacagcctgctgtatgtccctactcttcttggccctctgccctcccct

SEQ ID NO: 22769 - DNA, 201 bp, Homo sapiens
ctgcgaggacaacactaagccgttcatgagggatctgtccccatgacccaaatacctcccattagttcccacctccaacactggagatcacatttcaacataagattggagggggacaaacatcaaaactgtagcatagggaagccagcatctgtccacagcctgctgtatgtccctactcttcttggccctctgccctcc

SEQ ID NO: 22770 - DNA, 201 bp, Homo sapiens
agaggactctgtgattcttcccaaaaggtcactccctatccagaatgataagtcctcagtttttagaatgtagttgttaggtaaagggattaatccagagraagagattttaaggctgcatcattgattttattgttttggataagaacgtggaattggcttttctgtaaattgactacattatataaggcacaggttaaa

SEQ ID NO: 22771 - DNA, 201 bp, Homo sapiens
gggccattctttctgagatggttccccttactgctttcctctgtcctgatgtgggaatagggggaagggggtgctatgatccttttatgcctgatatgtgmctggtaaagaattctagaactggccaggcacagtggctcatgcctataaccccagcactttgggagttcagggtgggaggatcacttaaagccaggaagt

SEQ ID NO: 22772 - DNA, 201 bp, Homo sapiens
cacacattattggagaataaagatatcatgtgtgtatacatttcccaagtgactaaaacttacccatttcaacaccatacttaaaatgtttttttttttttctggacaaaaatttaacaggaagacatcatagcatcccataccttctgatatagagtagaggacgaaggggaatgaatggcactggcattttaataagca

SEQ ID NO: 22773 - DNA, 201 bp, Homo sapiens
ttaatcctcccagcaacgttgtgagataggttttattattatcatttccattttagaggaggaaactgaggcaccgagtgattaattctcttacccaaggyccttgctcgttcatgagaggtgggcttaggctttgcagccagcaatctggcttcagagtctggactcttaaaatatacatacacagcagcataagtaagt

SEQ ID NO: 22774 - DNA, 201 bp, Homo sapiens
atgaatctacaatcttttaggtctcaaggaagctgggtcaataattcataacccgttaagtctcaaggcagctgacttcctctactttctaaaactttcargttacccagttggtaacatgttgaataataagtcttctctcagctattccttgtttatcatgtggatcagcaacttctctaacatttccgtggaattcta

SEQ ID NO: 22775 - DNA, 201 bp, Homo sapiens
ttcagttatctggacacaccagcatcttttctatctgccaggctttgtcactgcataccaacatgaatgcatgggatgcagacacaaagccccaggctcarcatgtccctctccctctctgcatacatctcctgtacttctctaagctttgcagccatctaaggacatctgtaaacagtactgcccatagtcctgagcccc

SEQ ID NO: 22776 - DNA, 201 bp, Homo sapiens
aaaataccatggactaatagagtgtcttgcttccaaggagtttaaactgttttataattctgccaaccataatttatcttcataagctgccgtagagacaagagaaaaagtgagattaataatcacattttatagatggtgaaataaaaactcagagaaattgagtaacatttttccagaaatgcacagctccgcctgtgc

SEQ ID NO: 22777 - DNA, 201 bp, Homo sapiens
taaaataccatggactaatagagtgtcttgcttccaaggagtttaaactgttttataattctgccaaccataatttatcttcataagctgccgtagagacaagagaaaaagtgagattaataatcacattttatagatggtgaaataaaaactcagagaaattgagtaacatttttccagaaatgcacagctccgcctgtg

SEQ ID NO: 22778 - DNA, 201 bp, Homo sapiens
cctgggtgtgctcagggagagtctgggaccaccaagagtctcaggtgctgcctcaccgcccctcactctttcttctctgacttccctcaagagtccctccctcccttcctcctgccttcctttcttcccttctccacccaaagccccagctgatgtgtgacagctccctgattccataagctggttagctcagttggctgg

SEQ ID NO: 22779 - DNA, 201 bp, Homo sapiens
tgaggtgtacagagatcagtcatgcacaggccatggcctcgggatgcttccagtctaggagctgattatagatgattcttatttaaaaaaaaaaaaaaaaactatcagtgcaaggatgagtgaaagagctgaattggcagtagagacatagttagcgttgtaggaatagagcacaggagggagcctcagtcagcagggagt

SEQ ID NO: 22780 - DNA, 201 bp, Homo sapiens
gtgaggtgtacagagatcagtcatgcacaggccatggcctcgggatgcttccagtctaggagctgattatagatgattcttatttaaaaaaaaaaaaaaaaactatcagtgcaaggatgagtgaaagagctgaattggcagtagagacatagttagcgttgtaggaatagagcacaggagggagcctcagtcagcagggag

SEQ ID NO: 22781 - DNA, 201 bp, Homo sapiens
cgctgtttctgctctggtatcacttgccccttgctcctactgccctagcccttgtgtcacttccttgttctcctgaacagtttttttttttttttttttttgagacagagtcttgctctgtcacccaggctggagtgcagtggcgtgatctcggctcactgcaacctcagcctcccaggtgcaagccattcttgtgcctca

SEQ ID NO: 22782 - DNA, 201 bp, Homo sapiens
gaacccaggaggtggaggttgcagtgagccgagatcacgccactgtgctccagcctgggtgacagagcgagactccgtctcaaaaaaaaaaaaaaaaaaaagtggtgttttaggaaacttcgcctggcagtcgtacacaggagagacagctagggacaggcttgtacacccctggtatatggcccgagtggtaaactcaac

SEQ ID NO: 22783 - DNA, 201 bp, Homo sapiens
tgaacccaggaggtggaggttgcagtgagccgagatcacgccactgtgctccagcctgggtgacagagcgagactccgtctcaaaaaaaaaaaaaaaaaaaagtggtgttttaggaaacttcgcctggcagtcgtacacaggagagacagctagggacaggcttgtacacccctggtatatggcccgagtggtaaactcaa

SEQ ID NO: 22784 - DNA, 201 bp, Homo sapiens
ttgaacccaggaggtggaggttgcagtgagccgagatcacgccactgtgctccagcctgggtgacagagcgagactccgtctcaaaaaaaaaaaaaaaaaaaagtggtgttttaggaaacttcgcctggcagtcgtacacaggagagacagctagggacaggcttgtacacccctggtatatggcccgagtggtaaactca

SEQ ID NO: 22785 - DNA, 201 bp, Homo sapiens
cttgaacccaggaggtggaggttgcagtgagccgagatcacgccactgtgctccagcctgggtgacagagcgagactccgtctcaaaaaaaaaaaaaaaaaaaagtggtgttttaggaaacttcgcctggcagtcgtacacaggagagacagctagggacaggcttgtacacccctggtatatggcccgagtggtaaactc

SEQ ID NO: 22786 - DNA, 201 bp, Homo sapiens
tattcacagcatcttcaccagaaatagattccatctcaagaaactactttttttgctcgttcataagaagcaactcctcatccatttaagtttgatcatgrgagtgcagcaattcagtcacatcttcagctccacttctctttctggttctcttcctatttctacctcatttacagtgacttacaccactgaagtcttgaa

SEQ ID NO: 22787 - DNA, 201 bp, Homo sapiens
caacaattaatcagcattctttcttgctggctccagcctcaggcgtctcctctttgactttgatttcatcgccctgggatttgtaatagaattgatccaaycgaattcaatcaagggcctggtcgtttccatgcatggctcattaatatttagcacctctgccccaagaatgaccagattctctccttttacactaaccac

SEQ ID NO: 22788 - DNA, 201 bp, Homo sapiens
aaaaaaccacactcacacatttgtaatgtttgtaatctttttattccatgataattgatgtagcctagcgtaattgtagtttttgtgtgtgtgtgaagtakctgacattctgtgctttagtacgttttatttcatcacttaatgtgtcccccccacccgcccactggctgtgacagtgtttttgcgaatgaaacagttcag

SEQ ID NO: 22789 - DNA, 201 bp, Homo sapiens
attacaggtgtgagccactgcactcggccagtaaatcatacctttttaaaatagcatttcacattaattatacttacttagttaacactgaggttatctaytattgcataagataccgttgattttagttgcatatcatatgcaggtaactgcttgcttgcttgcttttttttttttttttttgagatggagttttgcgct

SEQ ID NO: 22790 - DNA, 201 bp, Homo sapiens
aaatgcacggttggatttgcggcctctgaatagcacccactgcccccatccccactgcggcagctcacccttcacttagggcagggggctctgagttttgrggtcaggaaggcccccttccacctgtagtgagcaccagaaacttctgtccccaggtttccggttttcctttgaccttcttgagaggctgagacctctaga

SEQ ID NO: 22791 - DNA, 201 bp, Homo sapiens
ctaaaaaaaccacactcacacatttgtaatgtttgtaatctttttattccatgataattgatgtagcctagcgtaattgtagtttttgtgtgtgtgtgaartatctgacattctgtgctttagtacgttttatttcatcacttaatgtgtcccccccacccgcccactggctgtgacagtgtttttgcgaatgaaacagtt

SEQ ID NO: 22792 - DNA, 201 bp, Homo sapiens
catggctcactgcaacctcagtctcctaggctcaagcaatcctcctggagtagctgggactacaggtgtgtgccatcatgcccagctaattttttttttttaactgattttttgtagagataggctctcgttatgatgccctggctggtcttgaactcttggcctcaaatgatcctccctcttcagcctcccacaatgctg

SEQ ID NO: 22793 - DNA, 201 bp, Homo sapiens
ctccacgggccccagagcagatgggtcacttcttttggtttcaaatacaatttagtggccatcttccctcccatctttttcattaaaaaaaaaaaaaaaaagttctaaccactgcttttctaatcaccactgttctagccactaggactttctgtcctccacaaatctattgctgttaaaatatttgttttgattgttcca

SEQ ID NO: 22794 - DNA, 201 bp, Homo sapiens
tctccacgggccccagagcagatgggtcacttcttttggtttcaaatacaatttagtggccatcttccctcccatctttttcattaaaaaaaaaaaaaaaaagttctaaccactgcttttctaatcaccactgttctagccactaggactttctgtcctccacaaatctattgctgttaaaatatttgttttgattgttcc

SEQ ID NO: 22795 - DNA, 201 bp, Homo sapiens
ggatttgcgctcttctgacactaccgagctctcctttaagtcaccgttttacctaatcaataccatacggcttagcatttaatttttcttattgctttatrtgtggaataatggaaaagaattaaaagattgaaaaaccaaacacccacctcactccacattaggtgtgtcaaatctgagctgatgagaggccttccccac

SEQ ID NO: 22796 - DNA, 201 bp, Homo sapiens
gttttacttagtaatattcattaatgacctaaaccaagagagaatctcctacttaatgaagtgattaattagctctgggaattgaagtcgaaaacagaagrctaattgattaatagattactgtgttcatttttcttcctttcgtggaaaggagccagaatttggtccatgccaggtttgctgctttgggctagcaccatg

SEQ ID NO: 22797 - DNA, 201 bp, Homo sapiens
gggatggaacctccagtccatgtgtggcacctcttttacatcttcatcgtaagccctaccaggagtttgaaatgcaaaagttttagaaatataaaccaggytttacttagtaatattcattaatgacctaaaccaagagagaatctcctacttaatgaagtgattaattagctctgggaattgaagtcgaaaacagaaggc

SEQ ID NO: 22798 - DNA, 201 bp, Homo sapiens
ggctgttccagagaagagctagggtggatggcaggaagcggcagctgggatggaacctccagtccatgtgtggcacctcttttacatcttcatcgtaagcsctaccaggagtttgaaatgcaaaagttttagaaatataaaccaggttttacttagtaatattcattaatgacctaaaccaagagagaatctcctacttaa

SEQ ID NO: 22799 - DNA, 201 bp, Homo sapiens
aagtgtgcgaacttccaggacaggtccggagatggctgttccagagaagagctagggtggatggcaggaagcggcagctgggatggaacctccagtccatrtgtggcacctcttttacatcttcatcgtaagccctaccaggagtttgaaatgcaaaagttttagaaatataaaccaggttttacttagtaatattcatta

SEQ ID NO: 22800 - DNA, 201 bp, Homo sapiens
tcctacaagtccaagtcctccagcaacgtgacctccaccagcggtcactcttcagggagctcatctggagccatcacctaccggcagcagcggccgggccyccacttccagcagcagcagccactcaatctcagccaggtaagccccacagctggcgccccaggccaggcagggcccccatcccctcatccttccgcttca

SEQ ID NO: 22801 - DNA, 201 bp, Homo sapiens
aaaatttaagagttcaggtggacatgtccagtttagttttaaaatccttatgctttcactttccttagtaattattttaactccctttttctggtatggamaaatctttattttttctttaacctataaatgtaaagaatgtagtttcgaaataccaatatttatattattaccaatatggaactacagaggaaagtttaa

SEQ ID NO: 22802 - DNA, 201 bp, Homo sapiens
catgtcatttaatacttttgtaggtgcatctgtgaaatgaaatcctagaaatgggattatatagtcaagggacagatacatctgtcatttttaaaagttaytgacaaattcttcctgtagggtttataccgtattctactcatgcaagcagtatgtgaaagtgcctgtttccctagaacatcacccatggaatctgttgtc

SEQ ID NO: 22803 - DNA, 201 bp, Homo sapiens
atgtggggaccaaaggagacaaaggccaaagggggtgaagtgccaagcagaacactggcagctgaagacgcccagcagcaggcgatggggacaacggaagkttcattaaatagcaacaaggcaactcactccagcccccagcggtcactccttctgctgcccagaccggcaagtgtgactggtactctagaagcacgtagt

SEQ ID NO: 22804 - DNA, 201 bp, Homo sapiens
ttgattacatgacaaatgggcgggactgtggaatgtcacgttgtctcccaaaccttgcttcccttaaccttgctattttttctttattcctttctcttttycctttttcttttttctcttttttgttaacttctttccctacaaaaattgtcattttcatttttctcaaagccagcagagccattagtataccatatgtat

SEQ ID NO: 22805 - DNA, 201 bp, Homo sapiens
gcccagcgcttagggaagagggccgtagacccattagtggggagcttttgattcagtcagcaaaatgagggcactgggggtgctgttgttaatacatggtrtggctgaatctgaatgctcagaagcccctctttcccttggcctatcgccgcctgtgagagtccaaccttatgattgctgaactcccaggatttaatccga

SEQ ID NO: 22806 - DNA, 201 bp, Homo sapiens
ggcccagcgcttagggaagagggccgtagacccattagtggggagcttttgattcagtcagcaaaatgagggcactgggggtgctgttgttaatacatggyatggctgaatctgaatgctcagaagcccctctttcccttggcctatcgccgcctgtgagagtccaaccttatgattgctgaactcccaggatttaatccg

SEQ ID NO: 22807 - DNA, 201 bp, Homo sapiens
cattgaagaatcaaaatctcttccgaaatgtgggaaagagaccctctgtgagacacaggagttccaaggcttgagtcccagtgatgaggagctaagtcacrctaccaattggcttttgcctctcttgacagacaccagatgaccatgaagcagagacagggattaagtcaaaagaagcaagaaagtacattttcaactgtt

SEQ ID NO: 22808 - DNA, 201 bp, Homo sapiens
agcactttggaaggctgaggcgggtggatcaggagttcgagaccaacctggctaacatggcgaaaccccatctctactaaaaatacaaaaaaaaaaaaaaatagctgggcgtggtggtggtgcctgtaatcccagctacttgggaggctgaggcaggagaattgcttgaacccaggaggcggaggttgcagtcagctgaga

SEQ ID NO: 22809 - DNA, 201 bp, Homo sapiens
gagtgcagtggcgcaatctcggctcactgcaacctctgccccccaacaaggttcaagcgattcttctgcctcagcctcctgagtagctgggattacaggakcctgccactacacccagctaatttttgtatagcagcagagacgggtttcgccattttggccaggctggtctagaactcctgacctcaggccgtctacctg

SEQ ID NO: 22810 - DNA, 201 bp, Homo sapiens
ataacctttgccgttaaccaagatccattcctaaacaaggcagcaggctgggcaagggagcacccagaggtggttcaccaagagcctcctccaaggggagkctcctcgcccaccacaagccagggtctgcctcaccatgcattaaacatcattttcctacaaaagacaatttggtgctttctgtaagttacaggggctcag

SEQ ID NO: 22811 - DNA, 201 bp, Homo sapiens
cagaatctgagcggatagcagggacttctggaggatagtaagtgtcaggggaactcgtgacagggagaaggagcaccaagagagaatgcacacgtgctttyggccttttcccctgaaccactcacctctgcagctccagcacagtgtcattactattattcattaagtgtgacctgtaccatcaggaaaagattcatcagt

SEQ ID NO: 22812 - DNA, 201 bp, Homo sapiens
tgagcacgtttcccagcattagccttacaatgacaaaggcaaatgcagaagtgtgcgaacttccaggacaggtccggagatggctgttccagagaagagcyagggtggatggcaggaagcggcagctgggatggaacctccagtccatgtgtggcacctcttttacatcttcatcgtaagccctaccaggagtttgaaatg

SEQ ID NO: 22813 - DNA, 201 bp, Homo sapiens
gtgttctggggactctcctaggtgccaagtgtacagcattgagcaaaacagataaaattcctgccctgaagcagcttgcgttttagcagataaagacaaaygttccacttttttacaaagctttttacaaaagcttgaaggaaatggaagtggatatttattaaacctctggaggagttgaaatttctaagattagaagct

SEQ ID NO: 22814 - DNA, 201 bp, Homo sapiens
tgttctggggactctcctaggtgccaagtgtacagcattgagcaaaacagataaaattcctgccctgaagcagcttgcgttttagcagataaagacaaacrttccacttttttacaaagctttttacaaaagcttgaaggaaatggaagtggatatttattaaacctctggaggagttgaaatttctaagattagaagctg

SEQ ID NO: 22815 - DNA, 201 bp, Homo sapiens
aaaatatgggtcagtgagaaataggatttgctttatagaagttaactttggagaatcgtgtcctcaaaaagaaaagaagtctaaagataggaggactgagrgaatcctgggtgtggtgatcctaaccccataagttagcttggggtgctttcaggaagattttggtttccagcagttcagaagggaggtgggcatgatttg

SEQ ID NO: 22816 - DNA, 201 bp, Homo sapiens
gtctctgccgccgttactgaagttgtagagtgaaagctgcacagacaatacatacacgagtcacgtggtgggaggggcgtgtgggggggggggcgtgttcyggcaaaatcttactcctaaaagcagacttgggtttgaatttggtgtccagtctgtagtttggatccctgtagctagcctaagccaccataatgtctcatc

SEQ ID NO: 22817 - DNA, 201 bp, Homo sapiens
ggcatccaacagaacatggatgtgggaccagagcatctttaaggcttcttctcagagaggctggtagttctgagcgtgtttacagttccattgagggagaraaaaggaagaagcagggaaaaagagttaggtggggattttccccgtcagctcaggagaccttgtttctcttcagagagagtaggatggtagaaaacaaat

SEQ ID NO: 22818 - DNA, 201 bp, Homo sapiens
tcccttcacacctcgttgaccaggctgatggtgtgtgccagtgcctaagtcaagtcattgacaacaggaagaagatgagccctggctgagttaaactgacsaggatgtgcatcccccccatgctggaagtgaggccgtcttccctgagagtcagtatccgaacagaaagatcacccaatgcatgttgtttttaaagtactt

SEQ ID NO: 22819 - DNA, 201 bp, Homo sapiens
cagagctgtccatctgtaccacaagaagaagaaaagcagacttggcaatttactggatagggctcccatgatttcagtcttttgatatcacgggtaaaatkggatgactgagaaacagctacggataggagactgaggataggggtgccctctacagaggtcctcttagccgtctgcaccaaaacagtcagatagtcaccc

SEQ ID NO: 22820 - DNA, 201 bp, Homo sapiens
gaaaatgcatgggaaagccctttgcttttccacaatggaatcttgccttattccttagactcagagaaggctgtaagctgatcgaggatgtggcatacctygatcagcctgtggtatggagcaagactgctccatacctgacccggagccagcccctgacacgtgtgcataggaaggaggagggatgggttggtgtggatg

SEQ ID NO: 22821 - DNA, 201 bp, Homo sapiens
accccatctctactaaaaatacaaaattagctgggcatggtggtgcatgcctgtaatcccagctactcaggaggctgaggcaggagaatcgcttgagcccyggaagcggaggttgcggtgagccaagatcaagccattgcactccagcctgggcaacaagagtaaaactctgtctcaaaaaaaaaaaagagacaggcatcc

SEQ ID NO: 22822 - DNA, 201 bp, Homo sapiens
ggccctctaggatctcattgccctttcctccgtctcctcccagcctccctgcacttgctgtcctccagccattccttgccatttcttttcaaaggcacgcycctgcctcagggcctttgcacttactgtcttcccccacaaatagccctgttgctcactcccctcatatcctctggtctctgctcagatgctgccctatca

SEQ ID NO: 22823 - DNA, 201 bp, Homo sapiens
atcagaacaggacagtgggaagggcccggagaagcatctgcacctgactccccaggggcaaggtgggctggaggtaggtgacaaggtttggctcccaaacrggcactggccaaaaacaaatggaccagcagggccaagtgacatggcagaagaccaggtgggtgactcggtcaacactttcaaacatccccaaagttatag

SEQ ID NO: 22824 - DNA, 201 bp, Homo sapiens
cgcaagcacatgggagaatgggaggaattacagaaaacaggaaggcaagctcactgcctcacaaaagattccttggtggaagactttcccagttcccttcygcagaaacaatgaaggtctgaggacatggggttatcatcaatctcttcattacagtcactcatctcagagaccagcattgcaactggagggcagctgctc

SEQ ID NO: 22825 - DNA, 201 bp, Homo sapiens
taaccagttgaaggctttaagagcaaaaattgaggttttagagggaaggaattctgccgcgactttagcatcaattcttgcacatttcctgcctgtcctgyacatttcagacttgccagtccccacaatcacacaggccaattccttgaaatgaatcttttctatatcttacatacaaatgcatatgtttctctagagaac

SEQ ID NO: 22826 - DNA, 201 bp, Homo sapiens
cactgcccactcccagcctcctttccacgttgagagcccagggagggcatctaacctactccccaatctgcaaatctaatctccacccccagaagcacccracgtctctcctactcgacctcacaggtgcgccccatgcacagtcctgcccagcacaagcacatggcctcactcccacgtctccttatttccctgacacag

SEQ ID NO: 22827 - DNA, 201 bp, Homo sapiens
tgatacaaccttgcagaaagctggagtgggaatgccatttctccattggccttctcgttcttctctgtcatcccacctccagctgctaacgccccaggccycactgcccactcccagcctcctttccacgttgagagcccagggagggcatctaacctactccccaatctgcaaatctaatctccacccccagaagcaccc

SEQ ID NO: 22828 - DNA, 201 bp, Homo sapiens
ctgacatgcacgacttcaatgatacaaccttgcagaaagctggagtgggaatgccatttctccattggccttctcgttcttctctgtcatcccacctccarctgctaacgccccaggccccactgcccactcccagcctcctttccacgttgagagcccagggagggcatctaacctactccccaatctgcaaatctaatc

SEQ ID NO: 22829 - DNA, 201 bp, Homo sapiens
ctttaatactaatttcatttggtgtcacccaagtcctacccagccttgactcggccctgctcctccagtcttacccctctacccacacatctagaaggctsacatgcacgacttcaatgatacaaccttgcagaaagctggagtgggaatgccatttctccattggccttctcgttcttctctgtcatcccacctccagct

SEQ ID NO: 22830 - DNA, 201 bp, Homo sapiens
cacaaccactctcccctttccttttctttcagggaatgggccactcctggcaccctgcacattttagcatttgtttcctgtctctccccactagaatgcawgctgcagaggaattgtatccgtagcacctggtaagtgctcaatgaccactttttcaaggaccacatttccataatattaaaatgtattatgagagggaag

SEQ ID NO: 22831 - DNA, 201 bp, Homo sapiens
cggtttcaccatgttggccaggctgggcttgaactcctggcctcaagtgatccacctgcctcagcctcctaaagttctgggattacaggcatgagccaccrtgcccggcctctgtcctccagaatttttattttgctgcataaatgtaatgatattagggatctgttaggtattccatacatctacttatctgaataactt

SEQ ID NO: 22832 - DNA, 201 bp, Homo sapiens
gacccccataagggatccaccacagtgaaaccagttgaactgccctttcctgagcctctctgtgctccaggcactgccccatccctcccacgagacctgaygggaagcgggttaaggtggtttcatgttgaccatgtgtccacaggcttcgcagaccaagagcaagtcggcacaccaggacaggcatttgcatgggtgccc

SEQ ID NO: 22833 - DNA, 201 bp, Homo sapiens
ataaaatacgagaaaaacaagagcttcccatgagctcttgactatcccaggatcacacccagtttgggctagaaagacccccataagggatccaccacagygaaaccagttgaactgccctttcctgagcctctctgtgctccaggcactgccccatccctcccacgagacctgatgggaagcgggttaaggtggtttcat

SEQ ID NO: 22834 - DNA, 201 bp, Homo sapiens
aaaactccacgttcctataaaatacgagaaaaacaagagcttcccatgagctcttgactatcccaggatcacacccagtttgggctagaaagacccccatragggatccaccacagtgaaaccagttgaactgccctttcctgagcctctctgtgctccaggcactgccccatccctcccacgagacctgatgggaagcgg

SEQ ID NO: 22835 - DNA, 201 bp, Homo sapiens
tcaccaggggtgaagggaactggcaacaagtcaggtggccaagactcaaagcctgccaagaccactgggcacttttttggacttcctgaaaactccacgtkcctataaaatacgagaaaaacaagagcttcccatgagctcttgactatcccaggatcacacccagtttgggctagaaagacccccataagggatccacca

SEQ ID NO: 22836 - DNA, 201 bp, Homo sapiens
ggtcaccaggggtgaagggaactggcaacaagtcaggtggccaagactcaaagcctgccaagaccactgggcacttttttggacttcctgaaaactccacrttcctataaaatacgagaaaaacaagagcttcccatgagctcttgactatcccaggatcacacccagtttgggctagaaagacccccataagggatccac

SEQ ID NO: 22837 - DNA, 201 bp, Homo sapiens
tgtattggcacaaatccatcctgggttagtcgttgactactccaacacccacttcaggctttatagccaagggcaactttaaataaacatttaaacatccyaagtggtcaattcaatgacacccctcacaggtccaatgtatgacaatgctgttgaatgtgcctcttcatttcagcacactgccttcaggcaggtaagtgt

SEQ ID NO: 22838 - DNA, 201 bp, Homo sapiens
ttaaaataattacgggtttttatttcattcaaaagcactaagaggccaggagcggtggctcacgcctataattccagaacttttggaggctgaggcgggcrggtcacttgaggccaggagtttgagaccagcccagccaacatggcaaaaccccgtctctactaaaaatacaaaaattagccaggcgtggtggtgcacacc

SEQ ID NO: 22839 - DNA, 201 bp, Homo sapiens
tcaggcagtgggatgggtgataggaatgggtttattgacttcatagagtataaaataaacaattcaaatacacccaaatgcactctttcataaaagaaackgaagtaacaaattctgaccccatgatgagaccccagataaacgttaggggtcaccaggggtgaagggaactggcaacaagtcaggtggccaagactcaaa

SEQ ID NO: 22840 - DNA, 201 bp, Homo sapiens
cttcaggcaggtaagtgttttattagatctttttccagaactgcaaccactcctgctctctcatcaccctttaacacaatcctcacgtcctcctctcgccrcaagcacatgggagaatgggaggaattacagaaaacaggaaggcaagctcactgcctcacaaaagattccttggtggaagactttcccagttcccttccg

SEQ ID NO: 22841 - DNA, 201 bp, Homo sapiens
aatcgcttgagccccggaagcggaggttgcggtgagccaagatcaagccattgcactccagcctgggcaacaagagtaaaactctgtctcaaaaaaaaaaaagagacaggcatcccacatcaatgcttccaaggtgtgtacccttttgatctggcaattctgcctagaaggtcatctgaggaagtggccaggagagcacaa

SEQ ID NO: 22842 - DNA, 201 bp, Homo sapiens
ccccatctctactaaaaatacaaaattagctgggcatggtggtgcatgcctgtaatcccagctactcaggaggctgaggcaggagaatcgcttgagccccrgaagcggaggttgcggtgagccaagatcaagccattgcactccagcctgggcaacaagagtaaaactctgtctcaaaaaaaaaaaagagacaggcatccc

SEQ ID NO: 22843 - DNA, 201 bp, Homo sapiens
tcactttccttgacaactagaagttattttatttaccatataaatacttttccaatgctgtctaaaaccatgcttgtaattaatatatctggaaacaacaattaataaatgatgtgtgtattactttaaaataaaaataaaggtttctatgtaatttccgtaattaaggagattaatatcttacttaacagacttacatcc

SEQ ID NO: 22844 - DNA, 201 bp, Homo sapiens
cttttgatctggcaattctgcctagaaggtcatctgaggaagtggccaggagagcacaaacacacacatttacagatgctcatcacagtgtcactttgagracttaaacagaaactctgtgagttataagatcattgaagagctgtgactttaacctctccaccttacttcctccctagattcctctaggaacagaaaaat

SEQ ID NO: 22845 - DNA, 201 bp, Homo sapiens
ttcactttccttgacaactagaagttattttatttaccatataaatacttttccaatgctgtctaaaaccatgcttgtaattaatatatctggaaacaacaattaataaatgatgtgtgtattactttaaaataaaaataaaggtttctatgtaatttccgtaattaaggagattaatatcttacttaacagacttacatc

SEQ ID NO: 22846 - DNA, 201 bp, Homo sapiens
tttcactttccttgacaactagaagttattttatttaccatataaatacttttccaatgctgtctaaaaccatgcttgtaattaatatatctggaaacaacaattaataaatgatgtgtgtattactttaaaataaaaataaaggtttctatgtaatttccgtaattaaggagattaatatcttacttaacagacttacat

SEQ ID NO: 22847 - DNA, 201 bp, Homo sapiens
ttacaaaaactgtgcctgggaaaggagcccagtgatcacttgttcactgtgtgtgtctgggaaaaagtacatagataatatataagtactatataaataawtttttttttttttttgagatggaatatcgctctgtcacccaggctggagtgcagtggcgcgatcttggctcactgcaagttctgcctccctggttcatgc

SEQ ID NO: 22848 - DNA, 201 bp, Homo sapiens
ccacccaccttggcctcccaaagtgctgggattacaagtgtgagccaccacacccagccaataaatgctttcttaaagcaatttacagaattctattttayagtaaaaatgaattttcagcagtacagtgttcacagtgagattggattttattaaattatatatgatagaaaaaatgttacttatatgtataaagtaaaa

SEQ ID NO: 22849 - DNA, 201 bp, Homo sapiens
ctccctctgagtctaccagtctatgttggacagacaagaacacctgtttagttctaattttttctttctttctttctttcttttttttttttttttgagaygaagtttcactcttgttgcccaggctggagtgcaatggcgatcttggctcactgcaacctccaccttccaggtacaaacaattctcctgactcagcctcc

SEQ ID NO: 22850 - DNA, 201 bp, Homo sapiens
gaattctattttatagtaaaaatgaattttcagcagtacagtgttcacagtgagattggattttattaaattatatatgatagaaaaaatgttacttatakgtataaagtaaaataaacgtgattggcatttttaaacaaaatttttaaaataaaggtatacaatatgcccagattacataattcaaaaagtgcatgccac

SEQ ID NO: 22851 - DNA, 201 bp, Homo sapiens
cagtttccgaacattggaatactccctctgagtctaccagtctatgttggacagacaagaacacctgtttagttctaattttttctttctttctttctttyttttttttttttttttgagacgaagtttcactcttgttgcccaggctggagtgcaatggcgatcttggctcactgcaacctccaccttccaggtacaaac

SEQ ID NO: 22852 - DNA, 201 bp, Homo sapiens
atggggccaggtatggtggctcacgcctgtaatcccagcactttgggaagccaaggcaggtagatcacaaagtcaggagttcgagaccagcctggccaacrtggtgaaaccctgtcactactaaaaatacaaaaattagccaggcatggtggcaggtgcctgtaatcccagctacttgggaggctgagggaggagaatcgc

SEQ ID NO: 22853 - DNA, 201 bp, Homo sapiens
ttagacccctagtggaggaaaatttagatcaacagggacaggacccacctcagtgtggagttaggtttaaccacaaagtcttagacatttattattcatttcactttactttgaggaaggactcgttattggttgctctgtacatgttaaaagtcaaggatggggccaggtatggtggctcacgcctgtaatcccagcact

SEQ ID NO: 22854 - DNA, 201 bp, Homo sapiens
aatcatacattttgtaaaagagatccaaactcaattaatttcttttctaaattctccctgagtccacaaccagtctgtttcacatcaaaggagcctgttcrtctttgaaaatggataaaagagaatttaattgtttgaatttgagctcaaatcacaagtctggctttaatactaatttcatttggtgtcacccaagtccta

SEQ ID NO: 22855 - DNA, 201 bp, Homo sapiens
ttttctttcagggaatgggccactcctggcaccctgcacattttagcatttgtttcctgtctctccccactagaatgcaagctgcagaggaattgtatccrtagcacctggtaagtgctcaatgaccactttttcaaggaccacatttccataatattaaaatgtattatgagagggaagagcagtgaattttcctgttat

SEQ ID NO: 22856 - DNA, 201 bp, Homo sapiens
gaactgttgtcctgtcttaaatgaaaacaaaggtcaggaaatgcacacactgaataaagagtagaaatgatttattttaaaaatcatacattttgtaaaasagatccaaactcaattaatttcttttctaaattctccctgagtccacaaccagtctgtttcacatcaaaggagcctgttcgtctttgaaaatggataaaa

SEQ ID NO: 22857 - DNA, 201 bp, Homo sapiens
ggaagagcagtgaattttcctgttatctgcactggccacgtgttgcctgagcatgtgcctctatgtgtgtaattgagtctctctgtgcctcactttccttrtctgttaaatgggagttacaatattatcacctccacaaagttatggaaattaaatcacaggtggggattgtgcctggcaggcagcaagcactcggtaagt

SEQ ID NO: 22858 - DNA, 201 bp, Homo sapiens
aaggaccacatttccataatattaaaatgtattatgagagggaagagcagtgaattttcctgttatctgcactggccacgtgttgcctgagcatgtgcctytatgtgtgtaattgagtctctctgtgcctcactttccttgtctgttaaatgggagttacaatattatcacctccacaaagttatggaaattaaatcacag

SEQ ID NO: 22859 - DNA, 201 bp, Homo sapiens
tcctctggtctctgctcagatgctgccctatcagagagaatctcctgacacaaccactctcccctttccttttctttcagggaatgggccactcctggcaycctgcacattttagcatttgtttcctgtctctccccactagaatgcaagctgcagaggaattgtatccgtagcacctggtaagtgctcaatgaccacttt

SEQ ID NO: 22860 - DNA, 201 bp, Homo sapiens
aatatgaagctaaattggtgttccaggcattgtatgggttgcatacatattggcatgcacacacatacacacaatgcacacactattaaacttctggcaarcaatgacttttgacccaagcagagagaatttggaaactgaaaggaggcaagagagggtgagtcacagttaacatcaatcaaaggtccagtgtcaagccag

SEQ ID NO: 22861 - DNA, 201 bp, Homo sapiens
actttgcacagaatcaagggcccataatggcacactgtttctttgtttaaaatatcaggacccagaggagaaagagagctcatgtaccatttggcatgggmtacacagtgatccatagtaccttctaatgtggatgcagaacttttaacatataagactttgacatgatgttggaatcatggtctgttaaaatatgaagct

SEQ ID NO: 22862 - DNA, 201 bp, Homo sapiens
ctaggtaagtaaggcaaagtggtatggccaaaagctagtgccaggtgagtaaggcctaattgctaaggccaggagatcaaaaccaggtggataataccagrtgggtaagcacaatgggtaagaccatgaggttaagaccaggtgagtaacaccagaaggttaatagaaacaggctggtaaggcaaggaggttaaggccagg

SEQ ID NO: 22863 - DNA, 201 bp, Homo sapiens
ggctgagacttcgcgtcttaacaagctgctctcagttgatgctgatcctcatggtaccttggttcccagaccccattttaagcagcaaggctgcagaaaayagatgccctaggttaaatatgggggagtcctctccatggccaggcctggtaccagcgcccacaccaattctggatagctctttcccatctgttatcttct

SEQ ID NO: 22864 - DNA, 201 bp, Homo sapiens
cacgagacctgatgggaagcgggttaaggtggtttcatgttgaccatgtgtccacaggcttcgcagaccaagagcaagtcggcacaccaggacaggcattygcatgggtgcccagaagtttcaagatctgaccttggagagaccaggtccgggaggctgccgggaagtctccatcacaccggcctcagccgagtcacagga

SEQ ID NO: 22865 - DNA, 201 bp, Homo sapiens
ctcttccacggatccacaacctaagaggaagcctcagaggcacaggctctgggagtaccaggtggcagcttcaacccagaagcgcactcgagtgcagtgcrcttgaactctccaggtcaactgtggaaggccccttagctcaggcagtgggatgggtgataggaatgggtttattgacttcatagagtataaaataaacaa

SEQ ID NO: 22866 - DNA, 201 bp, Homo sapiens
gtaggtgacaaggtttggctcccaaacgggcactggccaaaaacaaatggaccagcagggccaagtgacatggcagaagaccaggtgggtgactcggtcamcactttcaaacatccccaaagttatagtaagcatcaagagaccacttactagagtctcactgttaagagtaaaaagagattgtgtatgcaaacaattaga

SEQ ID NO: 22867 - DNA, 201 bp, Homo sapiens
gtgggctggaggtaggtgacaaggtttggctcccaaacgggcactggccaaaaacaaatggaccagcagggccaagtgacatggcagaagaccaggtgggkgactcggtcaacactttcaaacatccccaaagttatagtaagcatcaagagaccacttactagagtctcactgttaagagtaaaaagagattgtgtatgc

SEQ ID NO: 22868 - DNA, 201 bp, Homo sapiens
tctgtaaatgctgagtcatttccagattggagaatgatttaagcaaagatggtgaggaggttagaaagctcttaggaaacggttgtcaacggtaaactcaygtcccagtttgaaacatgaaacactgtgaaactatgagagggcagaaaaataagacttcggaaaaatggaggtgagggtctagaagcctcaatgaagtag

SEQ ID NO: 22869 - DNA, 201 bp, Homo sapiens
tatgccagcactagtgcccagaaagtgcaggcagttccagctgttgccacaactgctgcctagacaattggcctatcagggcagtgttgggggaccagggrttgcaagagaaccagcttttaaaaacagcattgaagataaaatggcaaataaagactaaaagttttcagaatccttgtctcagaaggttctaggctgatc

SEQ ID NO: 22870 - DNA, 201 bp, Homo sapiens
actcgttattggttgctctgtacatgttaaaagtcaaggatggggccaggtatggtggctcacgcctgtaatcccagcactttgggaagccaaggcaggtrgatcacaaagtcaggagttcgagaccagcctggccaacatggtgaaaccctgtcactactaaaaatacaaaaattagccaggcatggtggcaggtgcctg

SEQ ID NO: 22871 - DNA, 201 bp, Homo sapiens
catttcactttactttgaggaaggactcgttattggttgctctgtacatgttaaaagtcaaggatggggccaggtatggtggctcacgcctgtaatcccarcactttgggaagccaaggcaggtagatcacaaagtcaggagttcgagaccagcctggccaacatggtgaaaccctgtcactactaaaaatacaaaaatta

SEQ ID NO: 22872 - DNA, 201 bp, Homo sapiens
ttgtgtatgcaaacaattagaaaaatcagaaataactaatgtttaaacaaaacctaacaccgtaatacttcaagacctttgggctcatagtctgcctgacwcataggaagtggacaggatggctcagagcactgtcaaggacctcacttgacctcctgcaagtcagttcttctcaggacaaagtggacttttccacaagtt

SEQ ID NO: 22873 - DNA, 201 bp, Homo sapiens
cctgccaccacgcccagctaattttttgtatttttagtagagacggggtttcaccgtgttagccaggatggtctccatctcctgacctcatgatccacccrccttggcctcccaaagtgctgggattacaagtgtgagccaccacacccagccaataaatgctttcttaaagcaatttacagaattctattttatagtaaa

SEQ ID NO: 22874 - DNA, 201 bp, Homo sapiens
actgacacctggtttcaggtgactttaaaagggacctattctgagagactccgtttcacaggagcttctttcagtgtggccagggccctctaggatctcaytgccctttcctccgtctcctcccagcctccctgcacttgctgtcctccagccattccttgccatttcttttcaaaggcacgctcctgcctcagggccttt

SEQ ID NO: 22875 - DNA, 201 bp, Homo sapiens
ctctaggatctcattgccctttcctccgtctcctcccagcctccctgcacttgctgtcctccagccattccttgccatttcttttcaaaggcacgctcctrcctcagggcctttgcacttactgtcttcccccacaaatagccctgttgctcactcccctcatatcctctggtctctgctcagatgctgccctatcagaga

SEQ ID NO: 22876 - DNA, 201 bp, Homo sapiens
tgcagaaagcggagatcgcaacattggactccagcctggtcaagaagagcaaaactccatctcaaataataataataataataataaaataataaataaamagcattactgtggctggccacacaggagcctcctagaagagtctacagcattgtgaggtgttcattatctttgggcagaaggaatacatgtgatctttat

SEQ ID NO: 22877 - DNA, 201 bp, Homo sapiens
cccgtatttactaaaatacaaaaaattagcgggtgtggtggtgggcgcctgtagtcccagctactcgggaggctgaggcaggagaatggcatgaatccggraagcagagcctgcagtgagccaagatcccgccactgcactccagcctgggggacagagcaagactctgtctcaaaaaaaacaaaacaacaacaacaaaaa

SEQ ID NO: 22878 - DNA, 201 bp, Homo sapiens
gaaaccccgtatttactaaaatacaaaaaattagcgggtgtggtggtgggcgcctgtagtcccagctactcgggaggctgaggcaggagaatggcatgaayccgggaagcagagcctgcagtgagccaagatcccgccactgcactccagcctgggggacagagcaagactctgtctcaaaaaaaacaaaacaacaacaac

SEQ ID NO: 22879 - DNA, 201 bp, Homo sapiens
tacataaaacttactgacacggaagatgcccacttcatatgcggtgtgcgtcatggccccattgtagagccttctttcattttaaacagcattactggccrggcacggtggctcatgcctgtaatcccagaactttgggaggccaaggcaggtaaatcacctgaggtcaggagttcaagaccagcctgaccaacatggtga

SEQ ID NO: 22880 - DNA, 201 bp, Homo sapiens
attccttgccatttcttttcaaaggcacgctcctgcctcagggcctttgcacttactgtcttcccccacaaatagccctgttgctcactcccctcatatcstctggtctctgctcagatgctgccctatcagagagaatctcctgacacaaccactctcccctttccttttctttcagggaatgggccactcctggcaccc

SEQ ID NO: 22881 - DNA, 201 bp, Homo sapiens
atcgcttgagccccggaagcggaggttgcggtgagccaagatcaagccattgcactccagcctgggcaacaagagtaaaactctgtctcaaaaaaaaaaaagagacaggcatcccacatcaatgcttccaaggtgtgtacccttttgatctggcaattctgcctagaaggtcatctgaggaagtggccaggagagcacaaa

SEQ ID NO: 22882 - DNA, 201 bp, Homo sapiens
ttataagccctaagattacccataagggtaattgagagtactgagaggcttcaatatcatcaaattcataattacatcaaacaatatatttatgaatagaygtatttccaaaacaggccccctcaccttttctagagctaagattttgatccataaagacttacttctccattgccttcaattagaccaacctgcagaaaa

SEQ ID NO: 22883 - DNA, 201 bp, Homo sapiens
gagaaagaaagaagaaggaaagaaagaaagaaagaaaggaaagaaggagggaaggcaggcaggcaggcactgacacctggtttcaggtgactttaaaaggracctattctgagagactccgtttcacaggagcttctttcagtgtggccagggccctctaggatctcattgccctttcctccgtctcctcccagcctccct

SEQ ID NO: 22884 - DNA, 201 bp, Homo sapiens
ctccatcacaccggcctcagccgagtcacaggaacgcaggctctgccatgcccagaagcctgagatgcaacttcaaggacaacgggagccagaacgcttgrcctcacacggaaggtgactcctaaccaccaccacacttgacgtagcaccagcacacggagattaggtgagagtgggctctggtgcaaagataacagtgct

SEQ ID NO: 22885 - DNA, 201 bp, Homo sapiens
cccacgagacctgatgggaagcgggttaaggtggtttcatgttgaccatgtgtccacaggcttcgcagaccaagagcaagtcggcacaccaggacaggcayttgcatgggtgcccagaagtttcaagatctgaccttggagagaccaggtccgggaggctgccgggaagtctccatcacaccggcctcagccgagtcacag

SEQ ID NO: 22886 - DNA, 201 bp, Homo sapiens
tccatcacaccggcctcagccgagtcacaggaacgcaggctctgccatgcccagaagcctgagatgcaacttcaaggacaacgggagccagaacgcttgayctcacacggaaggtgactcctaaccaccaccacacttgacgtagcaccagcacacggagattaggtgagagtgggctctggtgcaaagataacagtgctg

SEQ ID NO: 22887 - DNA, 201 bp, Homo sapiens
attgataaaatatataccaaaatgtattacaaacataaaacttcatgaggtcagtattattaatttcaaattttgggtttttttctaacattaaattattyaaaacttttatttaaaaatgccacattcaggtaaaaggtagtagatgggaaaatttcagcagtagatatttcagaatacaatggttgtagaaaaagggat

SEQ ID NO: 22888 - DNA, 201 bp, Homo sapiens
ccacatccttgtttcttaaacatcaaatggtgacttgaggagttaaacaagttaataaaacaaaagcattaatacttgacatatttctcttatcactaagwcatcatgccagttagtcaaaaaacaaaaataaattcagagtacctctttcacatgttaaactcattggattatttaaatactaagtgatttaacatagtt

SEQ ID NO: 22889 - DNA, 201 bp, Homo sapiens
ccccaccaaaatctcatctcaaattatagttcccataatccccacatgtcatgggagagacctggtgggaggtaattgaatcatgggggtgcttacctccrtgctgttctcatgatagtcagtgagttctcatgagatatgaaggttttataaggggcttttccccttttgctctcattcttctccttcctgccaccatgt

SEQ ID NO: 22890 - DNA, 201 bp, Homo sapiens
ttatatgagatttttacccaccctaaccttagactcagtgccacaacacagcatgctaaattaggttacatccttaaaaaataataataataattcacttkgggtggagtacagacctgcccgtagccatcagttttactgcaggcaaaataaagacacacctcttcctgaaaacacagacaacacaaattactgtggcca

SEQ ID NO: 22891 - DNA, 201 bp, Homo sapiens
gtagctgggactacaggcgggtgccaccactcccagctaatatttaaatttttatagagacagggtcttgctttgttgtgcaagctggtctccaactcccrggctctcacagtcctcctggcttgacctcccaaagtgccaccacacccaggctattttgaggacgtttctcttttcagaaaagttataagtattttgacc

SEQ ID NO: 22892 - DNA, 201 bp, Homo sapiens
ttaaatctctttattaaaatgaataccaataccaaattttattttataaggagtcatcatggcatagtatgaagagctgtgggttgacatcaggcataccyaaatttgaaaccagctctgctacttactcgctattttaactttagcatgttatttggcccctctgggtcatggtttaatcatctataaaacaaggatata

SEQ ID NO: 22893 - DNA, 201 bp, Homo sapiens
cctcctaaggatcttcacttcctccccctagaaaactacagagttgctctgttgtcacagtgtgaaaacacacacacacatgcatgcgtgcatacacatacacacacacacacacacacacttgatttggtgcataggaagtgacctaattcagtttgtcctcatcatagtgacaactagactgagccaatcagagacttt

SEQ ID NO: 22894 - DNA, 201 bp, Homo sapiens
tcattggattatttaaatactaagtgatttaacatagtttttctgagcatttcacacacaaaacattttttttttccacatgagaccattacttctgaatwttaaggaatttcatatggtgcatgtttgaggaatttcgtatggtgcctgctgtaataggatcttggcttatttgcatttgttgatcagatgcaactaggt

SEQ ID NO: 22895 - DNA, 201 bp, Homo sapiens
ttctgaatattaaggaatttcatatggtgcatgtttgaggaatttcgtatggtgcctgctgtaataggatcttggcttatttgcatttgttgatcagatgsaactaggtatagagattggatgagggaagagtaaagtaaaattacagaaaacttttaaggcttcccaagtttgttaccgtttgatagtattagaaacaat

SEQ ID NO: 22896 - DNA, 201 bp, Homo sapiens
tttttttactgttgtattccccagtgtctgcttccttgtaggtgatcaataaagatttcttgaataaatgaaagaataaggggctcccaacatctgtttgctctcttatccctctccttccctacccagtggttcctgttctctccattcccttaccaactggtatgttatttttaaaactaaaaatactctgttttatca

SEQ ID NO: 22897 - DNA, 201 bp, Homo sapiens
ctgggaaactttgggagaccttgtctctacaaaaattgaaaaatcagctgtagccctggctactcaggaggttgaggcaggaggattgctagctagatccyagaggttgaggcctatggtgatccgtgatcttgccactgctctgtagcctgggtgacagggtgagactcttgtctctaaaaataaataaacataagacac

SEQ ID NO: 22898 - DNA, 201 bp, Homo sapiens
ttttttactgttgtattccccagtgtctgcttccttgtaggtgatcaataaagatttcttgaataaatgaaagaataaggggctcccaacatctgtttgctctcttatccctctccttccctacccagtggttcctgttctctccattcccttaccaactggtatgttatttttaaaactaaaaatactctgttttatcat

SEQ ID NO: 22899 - DNA, 201 bp, Homo sapiens
aagtatacaatatattgttaacgatagtcaccctacagtacaatagacctcttgaacttatttctcctgtttaactgaaggtttgtatcctttgaccaatwtcttcccaactcccttagacctccaggccctgataaccaccattctactttctgcttttgtgagttcgactttttaagactccacatataagcaagatca

SEQ ID NO: 22900 - DNA, 201 bp, Homo sapiens
gtctagctctgacagtgagatcttgggcccactctgctatttttttgtcttattttctcattttcacaaacagataatgttttacctttgcaaaaagctgtatatatatatatattctaaagcttggatatcaatttttttttcttttttttttctgagatggggcttcactcttgttgcccaagccagagtgcaatgtca

SEQ ID NO: 22901 - DNA, 201 bp, Homo sapiens
taccaaattttattttataaggagtcatcatggcatagtatgaagagctgtgggttgacatcaggcatacccaaatttgaaaccagctctgctacttactmgctattttaactttagcatgttatttggcccctctgggtcatggtttaatcatctataaaacaaggatataattcctctctctagggttattatacagat

SEQ ID NO: 22902 - DNA, 201 bp, Homo sapiens
tctagctctgacagtgagatcttgggcccactctgctatttttttgtcttattttctcattttcacaaacagataatgttttacctttgcaaaaagctgtatatatatatatattctaaagcttggatatcaatttttttttcttttttttttctgagatggggcttcactcttgttgcccaagccagagtgcaatgtcac

SEQ ID NO: 22903 - DNA, 201 bp, Homo sapiens
agaagcaatataaactagtaatttaatgctttactccatttctacatagcatcttttaaaatttatttttagtatatcttgtcttagtggtttatgctggkgttaatattctggagataatattacatcagaattctatatcacacattttgtttttcactgtttaagaaaggtaagtaaataatacttcagaacagtgat

SEQ ID NO: 22904 - DNA, 201 bp, Homo sapiens
tcagcaaacataccttgactatttacatagccagagcacaagtaagtgctttggctgctaccactgttgctgccctttgacccattaaacacactggcctyccttccgtctctcatgtcctctccccatcttctcagaaacacaaggaatatgtctatatgtctattccttgtgtttctgtcctccacccgcttccttttt

SEQ ID NO: 22905 - DNA, 201 bp, Homo sapiens
atagttggattctcccatcttcttttctctgtcctctggcaaccactagtctgtgtccatctccacagttttgtcattctaaaaatgtcacagctgggcaygatggattgcatctgtagtcctagctactcgggaggctggggtgggaggatcccttgagcctaggggttcgaggctgcagtgagccgtgatcgtactgct

SEQ ID NO: 22906 - DNA, 201 bp, Homo sapiens
aacataccttgactatttacatagccagagcacaagtaagtgctttggctgctaccactgttgctgccctttgacccattaaacacactggcctcccttcygtctctcatgtcctctccccatcttctcagaaacacaaggaatatgtctatatgtctattccttgtgtttctgtcctccacccgcttcctttttctattt

SEQ ID NO: 22907 - DNA, 201 bp, Homo sapiens
ggattctcccatcttcttttctctgtcctctggcaaccactagtctgtgtccatctccacagttttgtcattctaaaaatgtcacagctgggcacgatggmttgcatctgtagtcctagctactcgggaggctggggtgggaggatcccttgagcctaggggttcgaggctgcagtgagccgtgatcgtactgctgcactc

SEQ ID NO: 22908 - DNA, 201 bp, Homo sapiens
gttgtttggtatctcccaaagtatgtgccaaagatcaccattaaaccatttatagatattctgccagaaataggaggggaagagttctatgggaaacaacragtgtcgtagtccattctggctgctataaccaaataacttagactgggcaatttttaaataatacaaatttattgctcacacttctgaaaactgggaagt

SEQ ID NO: 22909 - DNA, 201 bp, Homo sapiens
atccacatacaaacttttatgtgaacataagttttcatttctttagaataaagagtacaattgttgaatcatatgatatattagtttcctgttgctgctakaacaaattaccacaggctggaagcttaaacaacacaaatgtatcacagttgtatagcttaacaatccaacatatgtctcatcgggctaaaatcaaagtgt

SEQ ID NO: 22910 - DNA, 201 bp, Homo sapiens
taaaccatttatagatattctgccagaaataggaggggaagagttctatgggaaacaacaagtgtcgtagtccattctggctgctataaccaaataacttrgactgggcaatttttaaataatacaaatttattgctcacacttctgaaaactgggaagtccaggatcaaggtgccaacagatttggtgtctggtgagggc

SEQ ID NO: 22911 - DNA, 201 bp, Homo sapiens
ccagctttgttctttttggtcaagattattttgactattctgggcctttgtgattccatatgaattttaggattttttttttttttttttgcaaaggatcmtaagaaactactatgaacaattatatgtcaacaaatcatataacctagaaaaatggatagaaacatttaacataacaaaactgaatcaagagattggaaa

SEQ ID NO: 22912 - DNA, 201 bp, Homo sapiens
ggtttatattttgccgtccttgttgagaagaaaaacatggatgtatagatatacagtgatggatggactagcagcttaagaatcattttggggacattttwaaaaaaattttttgagacagagtcttgttccatctcccaggctggagttcagtggggcaatcgtggctcactgcagccttgacctcatgggctcaggtga

SEQ ID NO: 22913 - DNA, 201 bp, Homo sapiens
taaagctgtgtttgaagtaagactttgtgctgatttggatgtagttagagttggacccagtgatgtgcttgaactggctcttcccagtttgcaagaggcaygttctgaagtccaagaatgttgcaagttagtttttaaacagtcagtagccatgttgggagtatgtatacaatggaaattggcaatcactataaatcagtg

SEQ ID NO: 22914 - DNA, 201 bp, Homo sapiens
gcatccctcggttcagtcacacctaatattaactaaccgtcacaaccgccattccccatattagtacttagtgtgctaagtcagtgcaaaatgtgggacamttaatttacataatttctttttatattttaattcctgtgaataatatgtgtgctcttaagtatttataaacataaacatagaaaaacaaacacttgtgat

SEQ ID NO: 22915 - DNA, 201 bp, Homo sapiens
tgggcctttgtgattccatatgaattttaggattttttttttttttttttgcaaaggatcctaagaaactactatgaacaattatatgtcaacaaatcatrtaacctagaaaaatggatagaaacatttaacataacaaaactgaatcaagagattggaaatctgaacagaccaataattagtaaggagattgactcagta

SEQ ID NO: 22916 - DNA, 201 bp, Homo sapiens
gctgtgtttgaagtaagactttgtgctgatttggatgtagttagagttggacccagtgatgtgcttgaactggctcttcccagtttgcaagaggcatgttytgaagtccaagaatgttgcaagttagtttttaaacagtcagtagccatgttgggagtatgtatacaatggaaattggcaatcactataaatcagtgctcc

SEQ ID NO: 22917 - DNA, 201 bp, Homo sapiens
tttaaaaatcataaaatataactactgctataaaaatgtgttcatataagagactagaggataatattcagagcataaaacaatggttggagatccacagrcaaccaacactggtagtcaaatagtgattaaattcttgataagtcttgctgcttttttttctgaaattttatttaataatatcatataatgtttttcatt

SEQ ID NO: 22918 - DNA, 201 bp, Homo sapiens
ttcttgggatatttcctaaattcagtatgagattgttgatatagataagaaaactgacttgcaaagagatttcattgccccaggtaacacagctaagtggsagagctgcaatttgtactctgagtctggttttggggtctgcacatttgaccacaatgctactgcctgtattttacttaagataatagttatgtttatgac

SEQ ID NO: 22919 - DNA, 201 bp, Homo sapiens
aatcagatagacttagcttacatcccacctcaatttagtagctgtatgaacctggcaatattgtcttatatgtaaaattatgacagttattatacataatrcagtcagccccccaaatttacaggtttcaaatccgtggattcaacgaatcaagggtcaaaaaaaattttaagaaaaaaaaacagtaaaaaataatgcaac

SEQ ID NO: 22920 - DNA, 201 bp, Homo sapiens
atttacacattctttgagtgttctaatttcattgtcataaaagcttactattttctcatttttaagacatatttcatacttcttaagatagctcttaaatktattccagaaactttaaacatttttgatattgttgaactagttttggaatcaaaacaatttgtgattcccacataattgcagttaaattttttcagtgta

SEQ ID NO: 22921 - DNA, 201 bp, Homo sapiens
gacaatacagtatagtaactatttacatggcatttacattgtgttagctattacaagcaatctagagatgattttaagtatagggaggatatgcagaggtyatacgcaaataactacaccattttatataaaaaggacttgagcatctgtggaatttggtatcctggtgggggttagggaggggattggaaccaatcctct

SEQ ID NO: 22922 - DNA, 201 bp, Homo sapiens
tggaatcaaataacttttaaagatttgagaaaatcagcaccaatatttgaagattaaaacttgatccatctgtcagttagaattttgatttggaaaagccrcaggtaacagtgtaaattctagttttacaaatgtagtaataaagaatatacttcagtggcaatttaaacttcatattagtgaattaagatactcagtaag

SEQ ID NO: 22923 - DNA, 201 bp, Homo sapiens
atatcctaggaaatcagatgtcctacttgaaaattctaaccaggaacccattcccccaaatccccaaccaatttcctaaaagctaactaaatgcagtgaawtatttttaaagtaataaattataatttggggatgtaaaatgcttaaacagtggtttcctgatgacctaacaaatctagccttaaggaaccattgctaggt

SEQ ID NO: 22924 - DNA, 201 bp, Homo sapiens
cttttctttggtataccatagttcttgaaggctaaaattttggtaactgtttcaggaaaataaatactgtactatatttcgtttctttccttcaatcctgwtatgtaaagtaaacaaacctgttttcagaatatctaacctttagttgagtaaatgacaggtaggaaataaagctgttgatacaggagaatgagtaagtga

SEQ ID NO: 22925 - DNA, 201 bp, Homo sapiens
cctaggaaatcagatgtcctacttgaaaattctaaccaggaacccattcccccaaatccccaaccaatttcctaaaagctaactaaatgcagtgaaatatytttaaagtaataaattataatttggggatgtaaaatgcttaaacagtggtttcctgatgacctaacaaatctagccttaaggaaccattgctaggttgat

SEQ ID NO: 22926 - DNA, 201 bp, Homo sapiens
tctttccttcaatcctgttatgtaaagtaaacaaacctgttttcagaatatctaacctttagttgagtaaatgacaggtaggaaataaagctgttgatacrggagaatgagtaagtgaaaaaatccatcctttgtcaaccactcttattttttaaattgaatctgctttcagtttcagtagttgggagtgctagatgtaca

SEQ ID NO: 22927 - DNA, 201 bp, Homo sapiens
gttctgaatggccttgtagtcttctgttggttttggtttcatctttcagtagatggacctgtggaaaagtggaactggctttgaaaatgtactggaagcarttattttcctaagacaataattttttttctcttttccattttctttagaacatacaggctagaagatccactcagcatttaatgcatatgactttacatt

SEQ ID NO: 22928 - DNA, 201 bp, Homo sapiens
ctacataaaattctcttccaaatatttactcattttatagattaggaaactgatccccaatgaggtatatccttttggtatattggttaaagaataatatrtctacttgagagtggcatcctaattactgaaaactggactacgaacttttaaagtttaattaacagtaatttaatgtatttttatgttatttcttaatct

SEQ ID NO: 22929 - DNA, 201 bp, Homo sapiens
atagttatgaaactcaaaattaagctctctgtttaataatagacatcagagataacatgaacagatactgataaattgagaaaagagcttcagtaccaaaygaaacaaagaacacagatttccaggtgcttttttatctgatcatgttgcagcaccattggaaccattgtgtcactttaaccaagcctccaatatttttat

SEQ ID NO: 22930 - DNA, 201 bp, Homo sapiens
attcccctcaatgaatgaatatacttttaagatagggatgtgctacttttcctggttaattggcagttgagcagtggaaagaatatatgacttgtctgtgraaagagtcagtggtagaattgagacttttaacctttgcattcttgccctttccagtgacagatgctatcttggagtgttggtttgggtgtgccattttca

SEQ ID NO: 22931 - DNA, 201 bp, Homo sapiens
tttactcagttgcccaatttttgaatgaaactgaaaactgtggacagatacatcagggaagaggaacatacagagtaaaagacataaaagccttaaagttgcttcagtttcttcatttcatcttgtaaattacacaggagtccttcagataaaactcactggttatatgacaaattaagcaattagattactgcacaccta

SEQ ID NO: 22932 - DNA, 201 bp, Homo sapiens
gctgcttgctttacctctgaattcccttctccaatgccattttactccctgagctgctttcttggcagtttggggcaccccttgctgtttgtgcctgtgayagtctgacttccatctgctgctctgcagccaggagcctgctgtgctcccttcagtcacatctttcatgcctggccattcaagcacctttcatcaggtctc

SEQ ID NO: 22933 - DNA, 201 bp, Homo sapiens
aatggttgtaatatatgtcaccaaattcatggctaaatcatagaaattgatctgtcacagcttgttaaataagtattctttctcttacatgacttcttacrtgattttttccaaactgcttagtcaaagaagataatctttccagatagagaaaattttaaaatatctttattcctctttaaatttactgatttataaata

SEQ ID NO: 22934 - DNA, 201 bp, Homo sapiens
caaaatccaaaaaaaatctgaaatctgaaacactctggtcccaagcaattcagataaggggtattcaccctgtattattagtttttccagaaaaaaaaaaraaagattatcaaagatacacacccgactttagcactaaaatttttaagttgttgtaccttcaattgctttatttttccctttcaattctaatgttaaaaa

SEQ ID NO: 22935 - DNA, 201 bp, Homo sapiens
atgctcattggagcattttggatttcaaattttcagattacaaatgttcaaccagtaagtagaatgcagatattccaaaatctgtaacatgtctggtcccmagcatttcagataaggaatactcaacctgtatagtgttgcccaaaacttatttgaccatggaatacttctcctgaacacactgatttcttaacggaaatg

SEQ ID NO: 22936 - DNA, 201 bp, Homo sapiens
caaattttcagattacaaatgttcaaccagtaagtagaatgcagatattccaaaatctgtaacatgtctggtcccaagcatttcagataaggaatactcarcctgtatagtgttgcccaaaacttatttgaccatggaatacttctcctgaacacactgatttcttaacggaaatgctggcgtggaccatgagaagagcag

SEQ ID NO: 22937 - DNA, 201 bp, Homo sapiens
gcgttattttactccttgctatgtcacatttacatgtcagactcatttgctgtgatgtagcacactaggctggtgaaataattgcttgtgatgtccctaartccccgaggcttttttctacctcctgcttagatagtgaagagaagttgaagttgcgtcctctagtgttcattttgcgtaagagtgataggatgcggtagg

SEQ ID NO: 22938 - DNA, 201 bp, Homo sapiens
taaaatgcttaaacagtggtttcctgatgacctaacaaatctagccttaaggaaccattgctaggttgatacactcagaggacttttcgaaatgtctacayatgatcagacctttctaccagttgtgtttggaatgtaacaggagacttccctccatacattcttttgtttaaaatgttatgttaaatttgaggaatgtaa

SEQ ID NO: 22939 - DNA, 201 bp, Homo sapiens
gttaaaaccaagaggaattctatcagaaaatgttaaccacggagactctgtaagtgtgcccgatttttatttcctggtttatttactagatgaagtggatrtaactaacaggaaaacacctgattagtgctgcagactctgtgttcttatttaattctcatacaactttggaagttaaaagaccttaaattaattttgcaa

SEQ ID NO: 22940 - DNA, 201 bp, Homo sapiens
ttataaattcttttttttctcatctgacagtagcttttttctatacaatcagttacctttcactgtgtttttcacccatcctttttaaaatatttctgatrtcaggatttgctgcaaaagaattaacgaaaagtatcaagaagtttgctagagctttctttctactcttgcttctctcatggaatcaagtggaaaattggg

SEQ ID NO: 22941 - DNA, 201 bp, Homo sapiens
atttctgatatcaggatttgctgcaaaagaattaacgaaaagtatcaagaagtttgctagagctttctttctactcttgcttctctcatggaatcaagtgraaaattgggctttcttattttatttcattcactgagtaactactcacaagaatgtctacttcagtaaggtagttgaaccaagcatatcctgacagcctca

SEQ ID NO: 22942 - DNA, 201 bp, Homo sapiens
atcattaatacatttatgtaattgtacatgaatcattgtaatgctcattcaatccagaagaaacgtaatacttagaaccttatgttcatatgagtgaacaytttttaaaatttcaaaatatgtgcatatttttctaagaattattacaagatgatcagagaaagaaggaaattctattgggatagtagagtagaagtacaa

SEQ ID NO: 22943 - DNA, 201 bp, Homo sapiens
caccatggcacatgtatacctatgtaacaaacctgcacacctatgtaacaaacctgcacattctgcacacgtatcccagaacttaaagtataataataagmaaagataattagaagacaagctacaggctgggggagaatatttgcaaaagacacatctgataaaggactgttatccaaaatacacaaagagcttttgaaa

SEQ ID NO: 22944 - DNA, 201 bp, Homo sapiens
ttatatgtgaattggccacagctaagagtaaatgattgaaatcttttaaaacttttagttacattgtttacaatttggggtaaatgtctagataagtcatktaaattttttcacctaaactcataattttgcttctagagtcctaacgagtagtgaaatggagattaatcttgaaaatcccattagcttacatcactagaa

SEQ ID NO: 22945 - DNA, 201 bp, Homo sapiens
atgatttaaagtatacaagaggatgtgcgtaggtcataatcaagtagataccattttatataagagacttgaacatcctcagattttggtatctgcaggargtcctggaaccaatccctcatgaataccagagaatagtattttattttttgagcaactaaaatgttgtttttctgttagttttaaagcatagtttgattt

SEQ ID NO: 22946 - DNA, 201 bp, Homo sapiens
gtctagataagtcatttaaattttttcacctaaactcataattttgcttctagagtcctaacgagtagtgaaatggagattaatcttgaaaatcccattascttacatcactagaagcactttgtccacctgcttcctggacctagaagagtaaacctgtggttgtccagttctaggtggtagctttaagatactgcaggc

SEQ ID NO: 22947 - DNA, 201 bp, Homo sapiens
taaaaggacacaaaccaacctctttgtaaaacttctgccctccaaaggctttatgttctctaagatagttaagaagattaaaaaaaaaaaaaaagaaaaamaaagaaactcctgttcttaatgatcccatgctgatagtttttttttggataaagtgtaggctgctgttcatagagatgccaagtacatatgaaaggaggg

SEQ ID NO: 22948 - DNA, 201 bp, Homo sapiens
aaggagttcttctctatgggccacctgggtgctctaaaacaatgatagcaaaggctttggccaatgagagtggactgaattttctagctataaaggtaggrtgttaaattttttaatcgctactctctcttggcctcccccaacccccattctctgactcctacctttaggagaacgaataaaggcatcttaaggagcagt

SEQ ID NO: 22949 - DNA, 201 bp, Homo sapiens
ccgactgcttgcttcaaatcaaactgcactttcactgtgcttaacctcagtcaagttacttgcttcttttggctttaatgttatcttgcataaaaatcagkatatttaaaatacctcactagtttgttacatgattaaatgagacaatgtatataaaataacacagagcctgttatatggttacttttagccattaacagc

SEQ ID NO: 22950 - DNA, 201 bp, Homo sapiens
ccgaagtgctgggattactggtgtgagccaccgcacccagcctctacaagcttttattcatcataaccatacacatttattgttgcataccataagaagcrtaaagctttaaaagccttttctggactaggccacctctaccccctactttgtatggtttacattggtttctatgtgaatcatttgattattgcattcatg

SEQ ID NO: 22951 - DNA, 201 bp, Homo sapiens
attaatagaacagctggacaaatattttcacatgtgtttatgatatttttgttattttgtaaacttggatacttgaaatattggccatggaatgttaaaartaatgctattaaaaataactcaattaatggtacttattaatggcagtttttcttgatcattcttatcagtaaagcacatgctatctaggaggtaaaatat

SEQ ID NO: 22952 - DNA, 201 bp, Homo sapiens
gtcaagttacttgcttcttttggctttaatgttatcttgcataaaaatcagtatatttaaaatacctcactagtttgttacatgattaaatgagacaatgyatataaaataacacagagcctgttatatggttacttttagccattaacagcataatcataaaatatcacattataaagttgcaagagattctttccatac

SEQ ID NO: 22953 - DNA, 201 bp, Homo sapiens
caaaatttcttattgtactatactcaccgattttcagactgaggttgaccttgggcagctgaaactgcggaaagagaaactgagtctaggatgactttctrtctcaattcttgcattgtattgtacactccttaaggataaaagccatgtttcttcagaatcttatcccaaaaacttagcagagtgcctggtacataatca

SEQ ID NO: 22954 - DNA, 201 bp, Homo sapiens
ttgtatacatgcttaaaattcttaaaaatataaatttgtctctttttctatttttacaaaatatcaaggaactagaataatgttatcatcttcaaggtatwtatgcggtgaaaatgtaattcatactcctcccaaactttgctatggagagggggagtatttttagaaagaatctctttttatgtgtttgttcctgtccaa

SEQ ID NO: 22955 - DNA, 201 bp, Homo sapiens
atgtttgctttgactggactacttctatctcttggtagccattgctttgattgtgctttgtcttcaagatctgtagagctgtgtttcatttcctgttacarttctttgaagcagtacgtcaaaatcttgatcccacttgtttacagttttgattgaaagctctgcccttgtatgcagctgatctgggcataaggattttgg

SEQ ID NO: 22956 - DNA, 201 bp, Homo sapiens
ggaaaaatttttggacatttttgataatgaggaaaaaccatgtggcctagaaatataaaaaaaattaagaaaaaatgtcatgaatgtattaaatatgtatrtactagtctattttaccatttactaacatgaaatatacacaaatctattataaaaagttaaaattatcaaaacctacacacacaaacactactcagcctt

SEQ ID NO: 22957 - DNA, 201 bp, Homo sapiens
gaaaatggataatatgatagggagtgagacgttgagggaggaaggggagttgaattatactgggctaataataatattagataacattcctttagtgcttmttacatactagaaactacttacattgctttacagtaaagaaaaactcacagaaaggtccctgcattaatgcaaagtaggatattatacaattggcagttg

SEQ ID NO: 22958 - DNA, 201 bp, Homo sapiens
gggcgtggtggcagacgcctgtagtcccagttacttgggaggctaaggcaggagaatggcgtgaactcaggaggcggagcttgcagtgagctgagatcgcrccactgcactccagcctgggtgacagagcgagactgtctcaaaaaaaaaaaagaagaagaagaaggtttcaagaatttagtttctaaattcaggatgttt

SEQ ID NO: 22959 - DNA, 201 bp, Homo sapiens
ggctactcatatgtaaaagttactggaatggtcttcttatttttctgacctttttatatccatataaattcggatgatttctcattgatatttatgatatyctgctctgaaaataatataatcaattacttgcctttttaagtcaagtattctaccctagttgactataaagtgaattttttcaaaggaagtcttaaattt

SEQ ID NO: 22960 - DNA, 201 bp, Homo sapiens
aatttgaagctacaagagaatttagaaatcatccagtgcaacttattaaattatacttttgataggggatgctaaatggttagggaacttgtttggatctrtggatttcgttggttatatactcagctcttaattgccaaggaatagtcatgatgaaccagcagactttcctcacctagttggggagaaaagaattagatt

SEQ ID NO: 22961 - DNA, 201 bp, Homo sapiens
ctaacatgtaagcacatttatgattaatttttatatgagatcttctgaaaatcgtcacaggaaaagtagcagaaaattctatctttcctcaaattatattkttgtgttccataatgcttggattggggagggcatcccattgtggtcctatttataattagtatattattacaacttcatagaaattttgctaacagctac

SEQ ID NO: 22962 - DNA, 201 bp, Homo sapiens
gtgggtaacctgacctttctctctggctgctcttaacattttttccttcattttaactttggtgaatctgacaattatgtgtcttggaattgctcttctcraggagtatctttgtggcgttctctgtatttcctgaatctgaatgttggcctgcctcgctagattggggaagttctctttgataatatcctgcagagtgtt

SEQ ID NO: 22963 - DNA, 201 bp, Homo sapiens
ggtcctaagcagtaatagcttcctgcagtccctagactttggttccgtcagcatgccttaacctttccagcactttgggaaatattccctaagttgatttrtcttcagagtctctaacaggaccctgactaattttctattttatttttacaagtaaaaattgtatatatttatggtgtgtatgatgttttgatatatata

SEQ ID NO: 22964 - DNA, 201 bp, Homo sapiens
tcagctcactgcaacctacgcttcctgggttcaagcgattctcctgcctcagcctcccgagtagctgggactacaggcgcccactaccacacccggctaawtttttgtatttttagtagagatggggtttcaccgtgttagccaggatggtctcgatcgcctgacttcgtgatccatgcgccttggcctcccaaagtgctg

SEQ ID NO: 22965 - DNA, 201 bp, Homo sapiens
tatacatgctcataccttgttccttctaccactgtaccccaacctttccaccttacttttattagtctcttgtttcttcttccaattttttaacacaaacaaaaaatatgcaaatatatatgcaaatataaatatatgtttatgtgtgtgtatatataatatatattatatataattatattatatataatatatatatta

SEQ ID NO: 22966 - DNA, 201 bp, Homo sapiens
cactgtaccccaacctttccaccttacttttattagtctcttgtttcttcttccaattttttaacacaaacaaaaaatatgcaaatatatatgcaaatataaatatatgtttatgtgtgtgtatatataatatatattatatataattatattatatataatatatatattatattatatatattatatatatatatatat

SEQ ID NO: 22967 - DNA, 201 bp, Homo sapiens
tgtaccccaacctttccaccttacttttattagtctcttgtttcttcttccaattttttaacacaaacaaaaaatatgcaaatatatatgcaaatataaatatatgtttatgtgtgtgtatatataatatatattatatataattatattatatataatatatatattatattatatatattatatatatatatatatgtt

SEQ ID NO: 22968 - DNA, 201 bp, Homo sapiens
ccatttgtaattaaaattgaaaaaattttaattcttccatttaccttgactatcacaaatacatgtaatgattttttaaacccagtctagagctgaaccarttaagacaaaattgacataacagatttgcccacttttccattaaatatttttatccctaatcaggccctcaagttacctgctaatgctaattgtatgact

SEQ ID NO: 22969 - DNA, 201 bp, Homo sapiens
ctggctttttttcaatatcagacatcaccatattatgcttttttaaacgtatgtagataaaagtgaatgtggaacataaatttgcacagtcttcctggaargtggttaatatataatataaaaacttcaagtactcaccttttgtcctataaattctatttttaaaactttgtcctagataataagacaaataatccaaga

SEQ ID NO: 22970 - DNA, 201 bp, Homo sapiens
agtgactgggcttgttgacttgtacctaataggtttggttctaaatatagttttaaaacaaaccaactacagaattttctagtgtttgctcatctttagcyaatgtggcactctttccaccagaccttccgaaaagcaagagcagtggcgccttccattattttctttgatgaactggatgccttagcagttgaaaggggc

SEQ ID NO: 22971 - DNA, 201 bp, Homo sapiens
ataaatttgcacagtcttcctggaaggtggttaatatataatataaaaacttcaagtactcaccttttgtcctataaattctatttttaaaactttgtccyagataataagacaaataatccaagattgaatctgccttagagagttgctttaaggattattgcatatacactatatctacataacagaatgagaaactat

SEQ ID NO: 22972 - DNA, 201 bp, Homo sapiens
cttttccctggctagtcttagaagcaatcacatttttatataatgaactctgaggggtttaaaaatgagtgagacatggtatcctggagtgcagcatatgwctgctcagcatttacaggtttgtttgtttttttcctctctttacttttccatttagtagacactaggccataaacccgttttaatttattcactgagaag

SEQ ID NO: 22973 - DNA, 201 bp, Homo sapiens
tcttaattgccaaggaatagtcatgatgaaccagcagactttcctcacctagttggggagaaaagaattagattaattttcggttccttgaactctagaaktctataaatctatcaactgtaactatgtcaaatataatgctatggatgttactcttcttaattaactatgtctaccttcactttctcatagtccagctat

SEQ ID NO: 22974 - DNA, 201 bp, Homo sapiens
tttattcactgagaaggaaatgacataatattcactgctgtggctgcataggtcatcaattccctgggactcaggattacatctgagctgatatcagactscctcttcccaggatagtaaaatttgaagtctgtgtgtcaggggcctgcagtgtaagtattcgagaaagtttgttcaaagtatttcctttccaaaaagcag

SEQ ID NO: 22975 - DNA, 201 bp, Homo sapiens
tatatattatatatatttgatatatatacttacatatagatatctatatataatatacttatatgtaggtatctatatatatagctttttggggggtcctrcttagcctttctttctccataggtttaattgtagagctgtgtttcttttttttgtttgtttgtttgtttttgagacggagtctcgctctgttgcccaggc

SEQ ID NO: 22976 - DNA, 201 bp, Homo sapiens
taggatagttcctctactgcactgggcggggcttagactgggtctcctcaggatatgttgtgggatagaggctggtgagcatgtcggggaggatcagagtyccaggccatgagatttgtgtgaatctccccctggtttcttgtgtaagcaactataagctgggacctcagctagggaggcctggagcagtgtcacagttca

SEQ ID NO: 22977 - DNA, 201 bp, Homo sapiens
tatgcagctgatctgggcataaggattttggccctaatcatgtggaaagtttgcacaactttaatttttcagtcagaattgtttaacctgaaccaattgcrgtggctctggtggtgggtattgtttgtgctgttaatcatttatcttcttcaattagggaacaaacaagatgagttttttccttgcaaactgatgtggaag

SEQ ID NO: 22978 - DNA, 201 bp, Homo sapiens
aagaacaaaattttaaatctctctaagaggtttagtattgagtggcaattattttgtttacttgtctgtcttctctgttgactatgaactccttcgtggtrgagatggtgttgcttatgtttgataagtccaatcccagactcataaatgtttatttggttggataattagcaaattaattaattttgcctgttaatgcag

SEQ ID NO: 22979 - DNA, 201 bp, Homo sapiens
agagatgtggtttctccatgttggtcaggctggtcttgaactcctgaccttaggtgatccgcccacctcagcctcccaaagtgctgggattacaggcgtgwtccactgcatctggcctgaaacagtttttcaaaaagattaatcatcttgggttaatagaaaaaaatcaggcagaaagataaaactacttctgtcattact

SEQ ID NO: 22980 - DNA, 201 bp, Homo sapiens
gggtattgtttgtgctgttaatcatttatcttcttcaattagggaacaaacaagatgagttttttccttgcaaactgatgtggaaggtcagctgctggggkcttcatcttcaacatagtcttgttctttcagttatccatttgtaaactgctatctcattagggcattgtctcatgaacttttcataaagcatcaatagtt

SEQ ID NO: 22981 - DNA, 201 bp, Homo sapiens
tgtctgtatgctggagaataggaaatggttaactatggccagacctataccctagcatatctaaatctattacaaaagtgaattaaccactgtattaaagktttctagagagacagatccaataggagccatttattatctagatctatatatgagtttattagggagcactggctcatgtgataacactgtgaagtccca

SEQ ID NO: 22982 - DNA, 201 bp, Homo sapiens
attagcctcaaatattgatttttagactatgtataatctattactctgaaacagttttttggggtttttttgtttgtttgtttttgttgtttttttgagayggagtttcgctcttgttgtctaggctggagtgcaatggcgtgatctcggctcacagcaactgctgcctcccaggttcaagcgattctcctgcctgagtct

SEQ ID NO: 22983 - DNA, 201 bp, Homo sapiens
tgtgtataaaatatttctcaaagtagtactctgtaacaagaaaaccttgaccctgtttcttcaaatgaatataagctctaataaatagacatttgttcaawctctgaactatttaactgtaatgagttgaaaaaaaatttttttttttttgagacagagtttcgctcttgttgcccaggctggagtgcagtggtgagatct

SEQ ID NO: 22984 - DNA, 201 bp, Homo sapiens
ctgtcctgagttggtaaatgtctacttagatgccagtgatgcgaatagaaactgtcgtgtcagcttataacattctcagagggttgcactttcaatgcagrtggggggaaggacaaagtaatagcttcttgttgggattacagtaagtgagggctcaagtgaagatctcttagttccttgaatgatcctttaaaaggtaat

SEQ ID NO: 22985 - DNA, 201 bp, Homo sapiens
tgggctcaagctattcttctgcctcagcctcctgagcagctaggactacaggtgtgagccatcacaccagctaactttttaacatttttgtagagacaggktctcactgtgttgcccaggctggtctcaaactcctggcctcaagcagccctcccaccttaccctcccaaagtgctgggattataggagtgagctgctgca

SEQ ID NO: 22986 - DNA, 201 bp, Homo sapiens
atggggaagggaatttatatttaataccaacctacggcatgcctatattttaaactattaatcatccagtaacccataagcctaggaaggattagtccgasgtattacagtctcaaagagatagagcctggctatgcgcattgttctgtctgattatttttcattttctcttttgttttgtttttttgtttctagcctagg

SEQ ID NO: 22987 - DNA, 201 bp, Homo sapiens
ttctctgtttgtcctggcaaaacttatatttggaaaatgttctatttttcaggtatcctggtcagatataggaggactggaaagtatcaaactgaagttgsaacaggctgtggaatggcccttaaaacatccagagtctttcattcgaatgggtattcagccacctaaaggagttcttctctatgggccacctgggtgctc

SEQ ID NO: 22988 - DNA, 201 bp, Homo sapiens
tataataatacttgttacacctttaggaaaacatagttgttcaccatgctttatataccatgtgtgaacttttctatatttttttcctttcagagtgtatygttctttttgtttgtaaagcagcatacttgatgctgcaaccagtgactttttgccatgcattcttaatacttcttggaatatttggtttaggaagtgggg

SEQ ID NO: 22989 - DNA, 201 bp, Homo sapiens
atgtactcctaatttacttcttgttattcttggaattttttaaaggattttcctgattcttaaatggttctattcttttttgcagttcttctgttaatgayatgttttttatttttttttagttctctgtttgtcctggcaaaacttatatttggaaaatgttctatttttcaggtatcctggtcagatataggaggactg

SEQ ID NO: 22990 - DNA, 201 bp, Homo sapiens
cttgaacaggcgccgagttgtcacagatctcattagtctcatccgccagcgatttggcttccgttctgggggccctccgaggcctctacctggagcagggkttcctgccccccaccgagagcgcatgcctgatgagagacaatgactgcctcagagttaaattagaagagagaggagttgctgagaattctgtagtcatca

SEQ ID NO: 22991 - DNA, 201 bp, Homo sapiens
ttgcaacccctgcctttttttgttttccatttgcttggtagatcttcctccatctctttgttttgagcctatgtgtgtctctgtacatgagattttgagaygagtttcctgaatacagcacactgatgggtcttgactctttatccagtttgccagtccgtgtattttaattggagcatttagcccatttacatttaaggt

SEQ ID NO: 22992 - DNA, 201 bp, Homo sapiens
agccagcatggtccctgcaatgtaagttctgaagaaatgtgtcatttttctttttcctgaatagaatgaatgaatttggggaaggattgtattatactttwtgagaggaacagctcgaattctgttctcttccctgccagcccctcttgcatttcagggtttttacttgcccacagcattcttgcctagtaattaaaacct

SEQ ID NO: 22993 - DNA, 201 bp, Homo sapiens
cattgctttgattgtgctttgtcttcaagatctgtagagctgtgtttcatttcctgttacagttctttgaagcagtacgtcaaaatcttgatcccacttgtttacagttttgattgaaagctctgcccttgtatgcagctgatctgggcataaggattttggccctaatcatgtggaaagtttgcacaactttaatttttc

SEQ ID NO: 22994 - DNA, 201 bp, Homo sapiens
aaaagtttttgaccatcaagcagcagttgtcagtaggagtttataataccaagaatgtgctgcatatcttgtctcattaagttttaagtaacatttaaaamtattaaagcatgttacttgacctaattttatagcatttgagttgtcccattaaatggagcatctcgtaaatttcaagtattttatacttggcaatggtta

SEQ ID NO: 22995 - DNA, 201 bp, Homo sapiens
caatgagttaaggaatcctttcacgtttttcccaactttaaaattaaggattctcagggccctgtgtagagcagtaaaaataagacctcgtgtatgtgtakgtgtgtgtgtgtgtgtgtgtgtatgtgtgtctgtctgtctgtctggaggagaattgattggtgttccacttgggtgagagggttggctgtgagcctcaga

SEQ ID NO: 22996 - DNA, 201 bp, Homo sapiens
tattcctctgggttaagttttcctcttgttcttctttggtttctagctgacttacttgtgagagcagaaaattacctgggtgcttgagacccattgttcaygtgatggaactgtgatgcacatacatttgaatacatttaagttttttatttgccgtttgtaacttacactggaaagctaccctggtcctacagttaaaat

SEQ ID NO: 22997 - DNA, 201 bp, Homo sapiens
tgtgtgtgtatacatatatgtacattcacaatagccaagctatggaaacaaccagtgttcattgatagaagaatggacaaagaaaacatgatgtgtgtacwtatatatatatatatatatatgtgcatatatatttgcatgtgtacacacacatcacattttctttattcattctctgtcaatggacacaggttgtttcca

SEQ ID NO: 22998 - DNA, 201 bp, Homo sapiens
atatctcaaaataataagagctattcatgacaaacccacagccagtatcatactgaataggcaaaagctggaagcattccctttgaaaactggcacaagamaaggatgccctctctcaccactcctgttcaacatagtactggaagttctggccagggcaatcaggcaagagaaagaaataaagcgtatttaaataggaag

SEQ ID NO: 22999 - DNA, 201 bp, Homo sapiens
ccagcaccatttattaaagaggaaaatcttaaaagcaactggagaaaaaaaaaagataagatacagattaataaggtaataattcttattccctatagaarccatgcaaagcagaacacaaggaaatgacatatttcaagtgctaagtggatgaatctcagtcagattattcggaatactaatagcgttcatttatttagt

SEQ ID NO: 23000 - DNA, 201 bp, Homo sapiens
tctttatccttatggagcttataaatgtctaaggaaaagaaatgtggtaattctaggtacttctgaggatggttctaaggattaaatgatatattaaaaaraaccagcacaatttctggcatataacatttatgttcaataattttaagtatttaaaaaaatagttataagtagtctaagtgttctgaataagtgccaagt

SEQ ID NO: 23001 - DNA, 201 bp, Homo sapiens
agaaagaggggaaaggctgggagaaaagagaagcaaagacctctttgaatactcagcccttcccactcaccctgtgcatagcacttcacatttttacttgwctgcacaatctgtctgcttttcattggttttcagagtcctcgagtgatttttgtattttgtctgacatttttctttctttttttttttttttttaattga

SEQ ID NO: 23002 - DNA, 201 bp, Homo sapiens
aaatacacacttgtaacgcatgggccccacacttaccctaagttataaaaatggtacaattaggtaatttctaccctaagacagtcagtttttgctcagcratctaaccacgtaggcttgcttacttctgagacttgcttgacctatctcattgaactcgctctgtgcctgagatacatgtccaatttctcaaggcaagtt

SEQ ID NO: 23003 - DNA, 201 bp, Homo sapiens
cttaaggtgggatgtgtggttactgattttagatctttcttcttttctaatctaggcattcaaagccataaacattcattaagcactgctttagcggcatsacacatatttgatatagtgtattttcatttccatttagttcagcatattttagaatttcccttggtacatctttaaattatcacagtctacctttaagtg

SEQ ID NO: 23004 - DNA, 201 bp, Homo sapiens
caggagaatctggttctatattttgttacatataattattttcttttctaaaggtgttcttttattaagctcccaccataaaagaggggaaaataagcacrcgtcttacatgcctgatgtttagcacttcttacaaaagaaagaggaaaactttaacataatccactgataaaagcatatttgtcttggcttcagacagtt

SEQ ID NO: 23005 - DNA, 201 bp, Homo sapiens
atagctttatggaacaaattacagaactttactaaaggacgtaaatgaaaacttggttaaatgaagagctataacatgtctattggtggggcacataacarcataaagataccaattctccccaaatccaattccaattaaaattataataagacttttggggagcctcagttaactgactctgatgtagaaaaagtttct

SEQ ID NO: 23006 - DNA, 201 bp, Homo sapiens
agcctagaacatcagaatgtgacagtcagttgagtttcataggatgagctcattagcagtacatttctggtgcaaaggtttgagtgaagtagtttaattgrctataattatatttcattcttcatatccccttaggataattagaagaaattcattttagtttttattctttaaatacagtactgcattttatattttatt

SEQ ID NO: 23007 - DNA, 201 bp, Homo sapiens
gactttaagcatagaatctcttctcataagccagcccaggcacatcttactcaacaattcaagcaaaacctttggatctgtcagaaacagcttataggtckgcattaggtgattaattgccaggagaatctggttctatattttgttacatataattattttcttttctaaaggtgttcttttattaagctcccaccataa

SEQ ID NO: 23008 - DNA, 201 bp, Homo sapiens
ctgcaccctcaacctcctgggcccaagcaatcctcccacctcatccccctcaggtagctgggacaacagctgcatgccaccatgcttggctgatttttgtrgagatggggtttcaccattttgcccaggctggtcttgaactcctggggtcaggcaagccatcatgcccagcctattttctaatcttgatatgaggaagaa

SEQ ID NO: 23009 - DNA, 201 bp, Homo sapiens
taattttaggagaccacaagtgttagccacttacttaaatgtaatgtttccttcttttggagcttctgaatggtgattacagtgacattaaggtcaaatgygttttctttacagcatgaatccttacaatctaggaatatgctaatattcattgtgaaattccaattttcttatccagagataacagctgttaacattttg

SEQ ID NO: 23010 - DNA, 201 bp, Homo sapiens
gcaaggagtaatattgaatattcaaaaataaaatctattccttgacttcaaatcattaaagtagagctgcctatttaagaacttttatttgcacagtcctrttaattttaatgcctaaagcagtgttaatcgcatgacccacgtgaaaagattttaaaaattgctttgttagaaaatgtaatagacttgtcgttaaagttt

SEQ ID NO: 23011 - DNA, 201 bp, Homo sapiens
tttcaggaggcagagacaacgccatgattgattatcttaattaaatcatctgtaaggagggaagaattgagtgaagctaatggtgtagttggtgaagaagyagtcactcttactagctggaactgggaatatatgtttattttgtggcttggagagtgttcatattttgtccatacctgaatatgcagcggtcttgttttt

SEQ ID NO: 23012 - DNA, 201 bp, Homo sapiens
ccatcatcagtttcatcacagttgtactctttcttgcaaaaactctaccattagaattatttgaaaacttagagccttgttagagagtctggcctagttgyatcctttacctcactgtgtataggcgtttcagtatccatagttctcttggtcattaactaatgtttttaaattgttagctaaaaataaaacaaaaaacaa

SEQ ID NO: 23013 - DNA, 201 bp, Homo sapiens
ccagagcagctctcaaatatcccttctgtttttcagtactacaacaatacacaagatcttaaaaatgtagtagtgattattaaaaagggcttacagcaagwcctataacataatattatttatataaattacagacataataaataaaacagtagtatgtattattcaaggatgaatatatgtatacaagaccctatacca

SEQ ID NO: 23014 - DNA, 201 bp, Homo sapiens
acataataaataaaacagtagtatgtattattcaaggatgaatatatgtatacaagaccctataccaaatacaagggttttcatctctagtgtggtcggasggaaggggccagtagccaatattgggggtgaaaggaaatattaaataagagaagagccttgtatggaccaatgtgatagtgtgctatgtagattgaaaac

SEQ ID NO: 23015 - DNA, 201 bp, Homo sapiens
tccttgtgtcttcacttcatcttccttaataagtatttagaggcagtattttcgatattaacagcatagattctttaatttaggaaagaagaaaacttaaytttgatttttctaactttctgctcagctcttccaacgtgaatatgtaggtctctgtctcccggggtcctcattatgctttactttgccctttccagtgcc

SEQ ID NO: 23016 - DNA, 201 bp, Homo sapiens
agccagtatcatactgaataggcaaaagctggaagcattccctttgaaaactggcacaagaaaaggatgccctctctcaccactcctgttcaacatagtaytggaagttctggccagggcaatcaggcaagagaaagaaataaagcgtatttaaataggaagagaggaagtcaaattgtctctgtttgcagatgacatgat

SEQ ID NO: 23017 - DNA, 201 bp, Homo sapiens
tttaccggatgcagcaacaagaagggaaatatttaagctgcagtttcactccatgcctgtcagtaatgaagttgacctggatgaactcatccttcaaacckacgcatactcaggagcagaggtaagatagttcccttcaaaataccttagtgggaggaaagcggtggctcagggtcattaagcaaaataaattgcttgccc

SEQ ID NO: 23018 - DNA, 201 bp, Homo sapiens
gacattcacctgcagaagcttataaaagcacatgagatacaggcatcgtagcctactcagattgacatctacttgcagattctggtcatcagtgacttcawtgagcactgagagcagtttcattgaaggagcagtaagggcaaaaactagatcgtagagaactgaagtcaaaataatagttgagatttattgtggatatct

SEQ ID NO: 23019 - DNA, 201 bp, Homo sapiens
aaatcatcagtgaactcccattcacaattgctaaaaagagaatacctaggaatccaacttacaagggatgtgaaggacctctttaaggagaactacaaacsactgctcaaggaaataagataggacacaaacaaatgaaaaaatatcccatgtgctcatggatatgaagaatcaatatcatgaaagtggccatactgccca

SEQ ID NO: 23020 - DNA, 201 bp, Homo sapiens
ggtaactagagagatagtggtgggggcagggtatattcatagaatggaagagacttgaacatgtttataggttgaagagggagagtcagcagagagaatakagtgaaaatatccaagagaaaaatgagaaaggggataactaatgaaggaagatcacagaggactgtggtcatggacacaaagaaaggttttgccttcagc

SEQ ID NO: 23021 - DNA, 201 bp, Homo sapiens
agtgggtgaaaaagtgggcgaaggatatcaacagacactcctcaaagaaagacgtttatgcaaccaacaaacataagaaaaaaaggtcatcactggtcatkagagaaatgcaaatcaaaaccacaatgagataccatctctcaccagttagaatggtgatcattaaaaagtccagaaacaacagatgctggagaggatgtg

SEQ ID NO: 23022 - DNA, 201 bp, Homo sapiens
cacagtgaattagtctatatagtgtattagttataactcagtgtattcttaaagggtttcctcaattattttaatatttgacctgcaataatctgagaacsattttcattttctatacataatggctttgtagttcagtgttaaagctttggaatcttcagagtgaattgattgataaaagaaaactaatagtgcctggcc

SEQ ID NO: 23023 - DNA, 201 bp, Homo sapiens
tgatgtgggaattacggagattacaattcaagatgagatttgggtgtggacacaaccaaaccatatcatcttccaaacagaatttatcatcaacactgacragccatttcagttttatcttaattattgcaaggactggtcaagagaacgtgtttggaaattggaaattaatcatctatgttgaggaaataatttataaca

SEQ ID NO: 23024 - DNA, 201 bp, Homo sapiens
atcaaaaccacaatgagataccatctctcaccagttagaatggtgatcattaaaaagtccagaaacaacagatgctggagaggatgtggagaaataggaaygcttttacactgttggtgggagtataaattagttcaaccattgtggaagacagtgtggcgattcctcaaggacctagaaacagaaagaccatttgaccta

SEQ ID NO: 23025 - DNA, 201 bp, Homo sapiens
tacctttcagggaaataagatgtagaggtggaagacagtgatattgatgatcctgacctacgggcctaggctaatatatgtgtttgtgtcttcgtttttarcaaaaaagtttaaaaagtaaaataataaataaaatttaaaaataggaaaaagcctataggataaggatataaagaagaaaatatttttgtgcagctgtat

SEQ ID NO: 23026 - DNA, 201 bp, Homo sapiens
ggataaggatataaagaagaaaatatttttgtgcagctgtataacatgttgttttaacctaagtgttattataagagtcaaaaagttaaaaaaaaaaaaawaaataaaaaatttataaagtaagttacagattaattcctgaagaaagaaaagttttaaaataagtttagcatagtcttattgtaccgtgtttattataaa

SEQ ID NO: 23027 - DNA, 201 bp, Homo sapiens
gctggagaggatgtggagaaataggaacgcttttacactgttggtgggagtataaattagttcaaccattgtggaagacagtgtggcgattcctcaaggayctagaaacagaaagaccatttgacctagcaattccattactgggtatatacccaaatgattatgaatcattctataaagacacatgcacacgtatgttta

SEQ ID NO: 23028 - DNA, 201 bp, Homo sapiens
ccaaatgattatgaatcattctataaagacacatgcacacgtatgtttattgcagcactattcacaatagtaaaaacttggaaccaacccatatgcccatsaatgatagactgaaataaagaaaatgtggcacatatacaccatgaaatactatgcagccataaaaaagaatgagttcatgtcctttgtagggacatggtt

SEQ ID NO: 23029 - DNA, 201 bp, Homo sapiens
acccctataatcccagcactttgggaggcctagacgggcggatcacgaggtcaggagatcgagaccatcctggctaacatggtaaaaccccgtctctactaaaaaaaaaaatacaaaaaaattagctggggtggtggcaggcgcctgtagtcccagctacctgggaggctgaggcaggagaatggcgtgaacacgagaggt

SEQ ID NO: 23030 - DNA, 201 bp, Homo sapiens
aaaaaaaaaatacaaaaaaattagctggggtggtggcaggcgcctgtagtcccagctacctgggaggctgaggcaggagaatggcgtgaacacgagaggtrgagcttgcagtgagccgagatcgcaccactgcactccagcctgggcaacaaaagcaaaattccgtctcaaaaaaaaaaaatatatattagctgggcgtgg

SEQ ID NO: 23031 - DNA, 201 bp, Homo sapiens
actgagacttttgtctagaattgtatagaggtaaagagcatggatttacgtaggcttagtagaagaactaattttaaaataaatggtcacatcataagacytaagtcaggttatcaataaatatttataagtgtctgtaacttgcaaggccatgtcaggtaatgttcagcagtccccaacttcaatctagaatggagatgg

SEQ ID NO: 23032 - DNA, 201 bp, Homo sapiens
gacctaagtcaggttatcaataaatatttataagtgtctgtaacttgcaaggccatgtcaggtaatgttcagcagtccccaacttcaatctagaatggagrtggctaccaaaaagtatctttggattcctaggacccacagagattgactcagtgggtttgattgttaccctggattcatgggtaacactaaatggttacc

SEQ ID NO: 23033 - DNA, 201 bp, Homo sapiens
gaacagaaaaccaaacacctcacattctcattcataagtgggagttgaacaatgagaacacatggacacagggaggggaacataacacactggggcctgtygggggatgggggtgggaaaggggagggataacattaggagaaatacctaatgtaaatgatgggctgatgggtgcagcaaacccaccatggcacatgtata

SEQ ID NO: 23034 - DNA, 201 bp, Homo sapiens
aatttcctctgcagtgcttttccctcaggcagacccttgagtgattgtcttttttacctcctccaatttccaccattctcattttatgtgttcaagttaamtgtgaacaacagcaaacagctacactctgtaaaacataccatttctttccttgagtcaatgcattcacttttctggtaaatgattttgggggcctgcaga

SEQ ID NO: 23035 - DNA, 201 bp, Homo sapiens
aatggcgtgaacacgagaggtagagcttgcagtgagccgagatcgcaccactgcactccagcctgggcaacaaaagcaaaattccgtctcaaaaaaaaaawatatatattagctgggcgtggtggcacattcctgtaatcctcgctacttgggagactgaggcagaagaatcgcttgaacccaggaggcagaggttgcagt

SEQ ID NO: 23036 - DNA, 201 bp, Homo sapiens
caatgagaacacatggacacagggaggggaacataacacactggggcctgtcgggggatgggggtgggaaaggggagggataacattaggagaaatacctmatgtaaatgatgggctgatgggtgcagcaaacccaccatggcacatgtatacctatgtaacaaacctgcacacctatgtaacaaacctgcacattctgca

SEQ ID NO: 23037 - DNA, 201 bp, Homo sapiens
ggtatttggttttctgctgctgcattagtttgcttaggataatggcctccagcttcatccatgctgctgcaaaagacatgatcttgttttttatggctgcrtagtattccatggtatatatgtaccataatttctttacccaatctactattaatgagcatctagattgactccatgtctttgctattatgaatagtgcta

SEQ ID NO: 23038 - DNA, 201 bp, Homo sapiens
ttaaattgatatagttgaaactctaaagatacaactgcaagaatatatgtgggcaaatttttgaactattttgtggataaagggaaaaagggtaggaatcrgatgtttttcatcagtttttaggagtaattacaaagctaacaggaaaatatgtctcccttctaagataaaaggaacctgaatatttgtccctaatattag

SEQ ID NO: 23039 - DNA, 201 bp, Homo sapiens
taatagcaattatggtataaatagcattttgtatacaacttttatctattaatacatttggcctaaaaaagttttcagtttttgtaattttttcctcttayacccattaaattatttcatgtaattactgtatagtacttttatctatattggataaaaaccactgatacctgtctgggcatttgagttaatttttatagt

SEQ ID NO: 23040 - DNA, 201 bp, Homo sapiens
ggaacctgaatatttgtccctaatattagaaagcaaatggctcgcaaaaattctcaaagatagtgtgaatcatattcttttataacactggataaaggggraaaaaagtgacatttggggtattaaacctgagatgaacatcctaatccagagagtagctgatctttagacctacaggctgccagtgaggtgttgtcagat

SEQ ID NO: 23041 - DNA, 201 bp, Homo sapiens
gttggaggacatcctgtttttaggggaggactggagtagaacctgggctgttccagccggtccctccctgtctcaggatgttgcatttcctgcacatgctwcagttattcttgagagctacgatgggagagagagaacttggtcattccaagaccacccagagagctgtcctacaaaggatcttaaactaaaggaaatgaa

SEQ ID NO: 23042 - DNA, 201 bp, Homo sapiens
gataaagggggaaaaaagtgacatttggggtattaaacctgagatgaacatcctaatccagagagtagctgatctttagacctacaggctgccagtgaggkgttgtcagatgttggagtttaggcatagacaaatgcactgggaagagaacagtgccactggctagtcacttcacttctgggcctcagttttctcatacct

SEQ ID NO: 23043 - DNA, 201 bp, Homo sapiens
ttgcttttgcatctacagtttcaaccaactatgaattgaaaatatttggggtcggggaacaaaaattaacaatacagcattttcaaaatttaaattgttaaaaaaatagtataactatctgtagcatttacattgtattaggtattataagtaatctagaaatgatttaaagtatacaagaggatgtgcgtaggtcataat

SEQ ID NO: 23044 - DNA, 201 bp, Homo sapiens
ggaggggctggagctaagactgggcccccttggactctgctgtagggacggatttggaaagcttgtcttgttggctcagagtggcatgcatctcccagcakgtctcagcacagataggatagttcctctactgcactgggcggggcttagactgggtctcctcaggatatgttgtgggatagaggctggtgagcatgtcgg

SEQ ID NO: 23045 - DNA, 201 bp, Homo sapiens
ataccatgtttcttgtatcaagcctatcaagacacctaccaggatgttttataagattttctttgacacagaaggggaaagtcagtgtttcttctgtatcrgaacacttaatatatgaaaatgattttgcttcacaaaaactgtgaatataagtgtcttgcacttttatgttttgtccctggaagtctaggtcagatgctc

SEQ ID NO: 23046 - DNA, 201 bp, Homo sapiens
aaaaaaagtgggagtaagtgattggtgtcgcatgctgctgatagattaaatagattgagaactgaggattgaccataggattagtgaccttgacagagcamttcagtgggggagtgttcagaagtgtcatttcaatgggtttaaatgagaatgggaagagaggaaatagaaaatggaaaatgaagagagctcttccaagga

SEQ ID NO: 23047 - DNA, 201 bp, Homo sapiens
ttctgccctccaaaggctttatgttctctaagatagttaagaagattaaaaaaaaaaaaaaagaaaaaaaaagaaactcctgttcttaatgatcccatgckgatagtttttttttggataaagtgtaggctgctgttcatagagatgccaagtacatatgaaaggagggactcatatggaaggtgaacttattaccagaaa

SEQ ID NO: 23048 - DNA, 201 bp, Homo sapiens
tatttgaaaatagacatgatttctcttgttatagactatagaacctttaaaaattaatagataatagtatttgaagataagtaaagatattttttaaaccrtactttcaaaatcagttctttaggtgctgggaatgtagccgatcgtgttttggctcagctcttaacagaaatggatgggattgaacagctaaaggatgtg

SEQ ID NO: 23049 - DNA, 201 bp, Homo sapiens
ttcatttctctttcaggtagaactccctgtggaacatgaattttttttaactatacttttgttactactcagatgatatatactgtatcaaaagtgtatgyccttgtcaagttctctaaagtttgtgaaatacaagagaatatgcagtaaaattttaagtctgtttcctttccagatactttttctctgaagaactactgt

SEQ ID NO: 23050 - DNA, 201 bp, Homo sapiens
taaggtttgatagttaagactccttcatgtgaaataccagatgttttgagtccttgatataaaggtcagaagaaaagaaggatattggtttcataataaaytaacatgtttacagtaatgactatgcagtgtaagctgtggatattttgttatataagaatggcagggggtcctagaactgggggctggaaggcccattta

SEQ ID NO: 23051 - DNA, 201 bp, Homo sapiens
ctgcagaaacattttgctgcttttatctactattaaaaattcttattttagtaaggtaaacaaaaaatagtgcttttaatatttgtattcatatattatcrttgtgataagtttctctatgtacaccataacaattttcagtgataagtggcattcttaaccaaatatatacaaatggagtatcatcaagtttaattcttt

SEQ ID NO: 23052 - DNA, 201 bp, Homo sapiens
ttgactcaggtaaaaggaaatggaaccccatgcataaatagaaggattgatcttggcagcacagatacttcatctattgaaacaggaaagaaagttgagtrtgtacatacaagtagagggaaaggggtagactcaatggtgatagcatgttgaaagttcttctctgccacatgaacaaactttctttccagtgcttaaaca

SEQ ID NO: 23053 - DNA, 201 bp, Homo sapiens
tgtgcagaagtgttttagtttaattaaagttccatttgtctatttttgcttttgttgcttgtgcttttgaggttttagtcatgaattctttgcccagaccmatgtccagcaatcttccttaggttttctttagtatttttacagtttcagttcttacatttaagtatttgatccatcttgagttctttttttatacagtga

SEQ ID NO: 23054 - DNA, 201 bp, Homo sapiens
ccttctaaatgattgatatatgatgatatgttaggcttatttattgagtcaatgcttcacacctgttctgtgtcacaacacctcccttagaggataaggttttttttttttttaaaaaagcgattctttcttgtaatgccacaggcattataaatctctcaattgaaaaatactgaattaaatttgcttcttatttaaaac

SEQ ID NO: 23055 - DNA, 201 bp, Homo sapiens
ccaatggtttttttttttttttttttttttttttgagtcggattctcaccctgtcacccaggctggagtgcaatggtgcaatctctgctcactgcaacctytgcctcccaggttcaaatgattcttctgcctcagcctcccgcgtagctgggcttacaggcgcccaccaccacgcccagctaatttttgtatttttagtag

SEQ ID NO: 23056 - DNA, 201 bp, Homo sapiens
tacaaagattaatccctgctctgactggattagaagaaacagaaactgtaggccaggggtgcagggttcttcaggaaagaaatataagacaagaagttaaactaaataaaaataagacaaggatatatatgagtgatattgtaatgtataaagaaaagtgtctcattagacttgcaagctggtccatttacatttgatcat

SEQ ID NO: 23057 - DNA, 201 bp, Homo sapiens
acaaagattaatccctgctctgactggattagaagaaacagaaactgtaggccaggggtgcagggttcttcaggaaagaaatataagacaagaagttaaactaaataaaaataagacaaggatatatatgagtgatattgtaatgtataaagaaaagtgtctcattagacttgcaagctggtccatttacatttgatcata

SEQ ID NO: 23058 - DNA, 201 bp, Homo sapiens
tatgtctgttgttttaagtcgctaatttttggggtaattaactatcaaaagctaaaggatgcatatacttgttaactttttatataatgcagttgttttgyaaatttaggctgagaaacagtgctctatgggtaggaatattctctaaggacttattggtagcttaggttacttagtgtggttttgaattctttttgagac

SEQ ID NO: 23059 - DNA, 201 bp, Homo sapiens
atatatagttgattctcattatttgtggttagttatgttctattaaagttgccttgaacaccgttagcaaatactgaaccatttctcctagagggaaataygtatgtgtgtgtatatacatacatgcaacacacacaatatatgtagcgtatgtatatatataatatatatacatacacacacattttacatagattataa

SEQ ID NO: 23060 - DNA, 201 bp, Homo sapiens
gactctgatgtagaaaaagtttcttagatagctaagtctattttgaaatgtatcaggaagagggatgatttttttcaaccacattttaatccatatttgtaaaagtaatatggaactggcatagaaacagatgattacactaatgaaacagaagagacaggtcaaaaacagaaccatggtggggaaaaggaatgttgctta

SEQ ID NO: 23061 - DNA, 201 bp, Homo sapiens
accatgtgaactccacagagaacaaggacttaaaagtgacaggtataaccacagagctaatagaagaaaatgtaagagaatatttttctgatctttttttaaaaaaaaatatatatatatatattattttgagacacagtcttgctttgtcatccaggttggagtgcagtggcacgatcacggctcactgcaccctcaacc

SEQ ID NO: 23062 - DNA, 201 bp, Homo sapiens
aaagattaatccctgctctgactggattagaagaaacagaaactgtaggccaggggtgcagggttcttcaggaaagaaatataagacaagaagttaaactaaataaaaataagacaaggatatatatgagtgatattgtaatgtataaagaaaagtgtctcattagacttgcaagctggtccatttacatttgatcatatt

SEQ ID NO: 23063 - DNA, 201 bp, Homo sapiens
aagattaatccctgctctgactggattagaagaaacagaaactgtaggccaggggtgcagggttcttcaggaaagaaatataagacaagaagttaaactaaataaaaataagacaaggatatatatgagtgatattgtaatgtataaagaaaagtgtctcattagacttgcaagctggtccatttacatttgatcatattt

SEQ ID NO: 23064 - DNA, 201 bp, Homo sapiens
aggcgtggagcggtgagggttgtgtgggcaagtgagcccaggttcctgccactatgcacagtcaggcacacaagctgctgcatggggtgggcagctccagrcactgataacaggtgctggctccatgcaaggctgtggctggaccagatgtactgcacacatcttccactctgtgcacccgtgactggacgaggggaacac

SEQ ID NO: 23065 - DNA, 201 bp, Homo sapiens
gaggcgtggagcggtgagggttgtgtgggcaagtgagcccaggttcctgccactatgcacagtcaggcacacaagctgctgcatggggtgggcagctccasgcactgataacaggtgctggctccatgcaaggctgtggctggaccagatgtactgcacacatcttccactctgtgcacccgtgactggacgaggggaaca

SEQ ID NO: 23066 - DNA, 201 bp, Homo sapiens
ttggaaaagtttgagtttcactgccttttatttagaagtacctgattggaggtgtcaataaaacatttctaaatatgaatattttattaagagtaatcaartagctccacatagatgctacataataacagcatagaatcacaattttattaaaattcaaaagacttatgtatatattacctaaatttgctccctcattca

SEQ ID NO: 23067 - DNA, 201 bp, Homo sapiens
ctgtacctgtttatctcgtttaatttttattctatctcatatgaggtagatgttgttatgcccattttactgttttttattatctatctagtattcaaagrttcataacatcaaaaaagtcataataactgttacaatagctactgtagatccttatttttgacactaccctttactctgttttacatatcattttatttg

SEQ ID NO: 23068 - DNA, 201 bp, Homo sapiens
ctaatcctttgtcagttatatgttcacacatatcctctcccagtcctatttcttatctttatactttgtttatgttccatgtggccttttattgtaggagygtttaacatcatcagatttatcagtctgtttccttatgatttgtgggttttatgtcttcctaaagaaatccttcagtacacacaaaatcatatagtcttt

SEQ ID NO: 23069 - DNA, 201 bp, Homo sapiens
ccatttaaataacgttaatagaaacagattttgaagcctctaacatcatggtgcattaagagcataagagaaacgagccgggcgtgatggcttacgcttgyaatcccagcactttgggaggctgaggtgggcagatcatgaggtcaggagttcaagaccagcctggcgaacacagtgaaatcccgtatctgctaaaattac

SEQ ID NO: 23070 - DNA, 201 bp, Homo sapiens
atattgttaactgtagtcatcatgacatacaataggtttcttgaacttattgctcctgtctaactgaaattttgtgccctttggccagcactacctaatcyctctgctaaccaccatttactctctctgagttcaacttttttacactccacatataagtgagatcatgggatatttgaatttctgtgcctggtttatttc

SEQ ID NO: 23071 - DNA, 201 bp, Homo sapiens
atagtgctacaataaacatgggagtacagatagctctttgatatactgatttcttttcttttcttttagatatatacccagcagtgggtttgctagactayataatagttatattttttattttttgaggaccctctgtgctgttttctgtaattgcttatagaaattgactagttgacattcccatgtagaaaaagggat

SEQ ID NO: 23072 - DNA, 201 bp, Homo sapiens
agaaacctagggtgagaatacctgtgttaactgtttttaaaaatttccatgacatgtttggtcaggggagaagaatgttctgtgacaagtgccagttttaytggtgaggtagaaaaggccttagaaggtgctagtaagacagaaaaagaactgtaggaagaaatcagtatcggagagcacagagatcctcaatccttggat

SEQ ID NO: 23073 - DNA, 201 bp, Homo sapiens
gaggcacttctgtggatctgcagaaatgctgacattcatgtagagagggattgtgaacctaccccaaagtgctccagaaaggccatccataggtgcacccmagccaagctcctgtggaggagtcccagccacgtctgcagtgataggcaaagggtagaagtccccttctccaggtcccttcacgagcactggggctgccca

SEQ ID NO: 23074 - DNA, 201 bp, Homo sapiens
agttttgcctgttttgccttctcttctttcacttgttttatggtttgggagcttcatcattttattctgcatagcaggagttcatttttattgctgaattygattgtttaagtattatgagtaatgccatgaacattcttgcacatgccttttgctgcacaaatgtatgcatttctgtctattatttgtctaagagtggaa

SEQ ID NO: 23075 - DNA, 201 bp, Homo sapiens
ctccataggtttaattgtagagctgtgtttcttttttttgtttgtttgtttgtttttgagacggagtctcgctctgttgcccaggctggagtgcagtggcrcgatttcggctctctgcaacctccgcctcctggtttcacgccattctccttcctcagtctcccaagtagctgggagtacaggcgcccgccaccatgccca

SEQ ID NO: 23076 - DNA, 201 bp, Homo sapiens
atttaagtaaaagaggacactccaacaaaactagtattcactgcacctctgagcatagcacacatcctttctgagttcaggtgggtacaattagctgctastaaaaatgaaccattagtgaagtcagtgaatattaaatgtgggacttacaaggctaggaatgacaaataatgggaaaaaacattttgtactctaatttta

SEQ ID NO: 23077 - DNA, 201 bp, Homo sapiens
cttgtagaggcatttgctccattgttgagggttggtactgtctaaagttaaaccatttcagtgatgcctagcatggaacacttgacaaccaaccttccagstaggaaatgagacgtccttgccagcaagtccatataatactacaatttttatgactagactatttttgcagaagtacttattgcttaattgacattaaac

SEQ ID NO: 23078 - DNA, 201 bp, Homo sapiens
aagaagttcatgcatttattaactggaaaagtagattacaaaactataaataacacaacatttatgtaaaactatgtatgttacaatggtctggaaaattrttccccaaactgctaacagagccatcacgtttattatttttactttttttttttttttttaaagaaacaaagcctcactctgtcacccaggccagagcac

SEQ ID NO: 23079 - DNA, 201 bp, Homo sapiens
atagcgttcatttatttagtacatattgtaaaccagaaattatgctgattattttaatatgcattatctcatttaatccttacagcaacccggagaggcarctagaattaacacattttagaggtgaagaaaatgaggctaagagaagccaagggacttggctaataaatgttacacacttagcaaatggaaaattcagga

SEQ ID NO: 23080 - DNA, 201 bp, Homo sapiens
agagaagccaagggacttggctaataaatgttacacacttagcaaatggaaaattcaggatttcaaaccagatatgattaacataagccatgtctcctctyactattaaccataactggtagaacatatacataacttaaatttgataggtaagctgattggaggctatttgttgtggtacgaatgtttgaaaattgctgt

SEQ ID NO: 23081 - DNA, 201 bp, Homo sapiens
tatatttttatataattttttatgtttgcaaaccaagaaacatgccatttctcctagtaaaaatgggggaagtgaggactactttgccttttctcctggasagagtagtcctcatttcccccttttttctttataaaaaggaaatgatgataaaaaattgttaattggataccacttcaaatggggattagttatgcatag

SEQ ID NO: 23082 - DNA, 201 bp, Homo sapiens
aacaaaagtgtagttcatcttttccaatcctgctgaaaattagggcaagatacagacagaaaaggcatttcttaaaattttaacaacctggaattcattcrtgattttaacaagaatcattttggtggagtgagagggacagatttgagtcagctgagaaaagtgtgacaaatgaggaaccagagacagagcttaaacaat

SEQ ID NO: 23083 - DNA, 201 bp, Homo sapiens
ctattaccatctagatttgtgtaaggacagtctgtctacacaacagtgaaagcacctaacaatgcacttctcagaacatatccctgttgttgagcaacacrtgactgtatgttactgcactgtttgtaaattttctgaagttgtgctccattccagtgcagtttttttctatgacaatacaacaaagaagctcctgttcct

SEQ ID NO: 23084 - DNA, 201 bp, Homo sapiens
aggagccagcaagtaacaatgcatgaataggaatatctagagaaataagaggtataatgtggagtgtcagaagccaaaagcgaagtgtgttaagaacaaargtgtagttcatcttttccaatcctgctgaaaattagggcaagatacagacagaaaaggcatttcttaaaattttaacaacctggaattcattcatgattt

SEQ ID NO: 23085 - DNA, 201 bp, Homo sapiens
aagccagagtgcaatgtcacgatcttggctcactgcaacctctgcctcccgggttcaagtgattctcctgcctcagcctcccaagtagctgggattacagrcatgcaccaccacacccggctaattttttgtatttttagtagaaacggggtttcaccctgttggccaggctggtcaggtatccattttttagtcaaaact

SEQ ID NO: 23086 - DNA, 201 bp, Homo sapiens
tgaggcacttcaacttttaaatttagccagagggggaggagccagcaagtaacaatgcatgaataggaatatctagagaaataagaggtataatgtggagygtcagaagccaaaagcgaagtgtgttaagaacaaaagtgtagttcatcttttccaatcctgctgaaaattagggcaagatacagacagaaaaggcatttc

SEQ ID NO: 23087 - DNA, 201 bp, Homo sapiens
ctttaattgagcattttatgttattttattttatctcttttcttagactgttaagttttttgggtttttttgtttgtttgtttttcagttgttaccctaarttttgcaatatatttctactttcaaatagccctattcacttcacaggtagtgcaagtaccttataataaaaaaaattcctaagttatccttctcatgtcc

SEQ ID NO: 23088 - DNA, 201 bp, Homo sapiens
tttttacatttattctgctcagtgttcactggacttcctggatgtgtatctgacattaatttggggaaattctcagtgaatgtttcttcaaatattggttmtcttctttcttcttttggtgttgctattacacatgctacacctatttgcttcatagttcttagatattttgttctgtgtggttttattatttttttttta

SEQ ID NO: 23089 - DNA, 201 bp, Homo sapiens
tggtcgtatatgtcttttgaatagcaataatttggaaagggggcttgacttttgaaaggaaaagaaagttaatgctttgggaatgtctggcttatatattrgctgtacattttcccctattgtgttgcctatgtctagcagataataaagtcttatgaaatcatttcattatgttagtgattaagcatttgtatttaaact

SEQ ID NO: 23090 - DNA, 201 bp, Homo sapiens
cccttcctcggatgtgccagcggggcaaaccgcccatctggccatgtgaatcaaaacccagaaacgttgagaggttccaggcagccttttggttacctctytttttctcaaccctgctctttttccaacccccgccctggccaccatggtacacatgctcatctggccactctgttggatgtgtttccatcagactttaca

SEQ ID NO: 23091 - DNA, 201 bp, Homo sapiens
tagaggccccaagttacaaacattcacatttcaggtggtcactacttctctgaccataactgatcactaaagccgctttgtcattaccatgtaagccaccmcaaaacaacaatttatagctcatagaaaaatctatagaagcaggctgggctcgggggctcacacctgtaatcccaggactttgagaggccaaggcgggcg

SEQ ID NO: 23092 - DNA, 201 bp, Homo sapiens
ttgacatgtaaacatgctcatttctcttccatcttaaatcagaacaaaagctccacattttcttcctgcaaccgtctctctatccattgccaagcttcttraatggagtggtctctgccgcctcaccacttacatactctccctagcctattcctctttgacttccaccccatcattccatggaaactgttcctggtgtgg

SEQ ID NO: 23093 - DNA, 201 bp, Homo sapiens
ttgaactagatccttcccattgacatgtaaacatgctcatttctcttccatcttaaatcagaacaaaagctccacattttcttcctgcaaccgtctctctrtccattgccaagcttcttaaatggagtggtctctgccgcctcaccacttacatactctccctagcctattcctctttgacttccaccccatcattccatg

SEQ ID NO: 23094 - DNA, 201 bp, Homo sapiens
gtaactgcacactagtgttagcagtatatatagctcatctaatttctacagaagccgtgaccgatgggtatagtaatgacagttttatagagggaggaaasttaacgtgattccattcaggctacacaggtgctaagtggcagagccgatatttgagtccagatgtgtttgacttaaaagccattcctagatgacagctcc

SEQ ID NO: 23095 - DNA, 201 bp, Homo sapiens
gatcttcactgtgagaagctggtgtagttgctgaagataaaactcacaaatgtgtgagggaccccgctctatgactctcagacttgtcaaacactgaaccyccagcagtttgttaattgcatttccagttgtcctaccctggcactggctctcatggaggtttctctttgtgggtttccgctccagaaagttgtgattttc

SEQ ID NO: 23096 - DNA, 201 bp, Homo sapiens
tactgtcctaattgttgtttttaaagtaattagaataaaaataatggattattctatttttttaagaagttagtcaggctgtcacattaaattaagtagtrtaggtgcaaaaccagtctttttaaactattactaccactttttccctaggtcataatttaataaaggagttcagtaatttaagttcctcatctatatcta

SEQ ID NO: 23097 - DNA, 201 bp, Homo sapiens
gagagttcttaagagactcttatcttttaagcagcatactctactcaattacccagccttttaatggagggcagatagaatagaatatgaagttagtgaaktagtattttgggctagaatgaatctaaggatttttagcttaacattataatatctttataatattaagtgaattctaaatttgatatgttgcatttcagt

SEQ ID NO: 23098 - DNA, 201 bp, Homo sapiens
ttttaaagtaattagaataaaaataatggattattctatttttttaagaagttagtcaggctgtcacattaaattaagtagtataggtgcaaaaccagtcyttttaaactattactaccactttttccctaggtcataatttaataaaggagttcagtaatttaagttcctcatctatatctaatatgtaatattttataa

SEQ ID NO: 23099 - DNA, 201 bp, Homo sapiens
tcaggctgtcacattaaattaagtagtataggtgcaaaaccagtctttttaaactattactaccactttttccctaggtcataatttaataaaggagttcrgtaatttaagttcctcatctatatctaatatgtaatattttataaggatttaagttgagtaaacatttgctctcagagcgtgaaccagtttctctttttt

SEQ ID NO: 23100 - DNA, 201 bp, Homo sapiens
ttaggtattttgctatgtgataaagatcctttggtaaaattcaggaaagctttggaccttaaaaaatcattcccttcctgatgcagtattttattagaagrtaggtgagttctgagtatttatagaatctgggttggtgttaaggcatctctgaagtctatacaaagtataagactgtatcttaacaaggactgtagaaac

SEQ ID NO: 23101 - DNA, 201 bp, Homo sapiens
tacaccatctccctctcaaacaaccagttactttactctaggacaagaatccaccatgcaaggtccctcatacaaaatcactttctttatatccctccccmcaaaaaaaaaaaaaaaaaaaaaaaatatatatatatatatatgtgtgtgtgtgtgtatatatatatatatcttttatccacactttcctcacatccctct

SEQ ID NO: 23102 - DNA, 201 bp, Homo sapiens
aaagtatttaaggaatggatgcctattaatctttcacattgtttatcaaaatgatgtgaatagtctttggtgagccatattaagattaaagctggaaagcstcctgtacggttgttttccaatttcagctttgccatctttacacaagactctcataagtgtttttgttattgttgctggattcttcttttgtttgttttt

SEQ ID NO: 23103 - DNA, 201 bp, Homo sapiens
ctcattattattattatgttatcttgatctgagatcagtgatatttaacattattattgtaattgttttaggacaccataaaccacacccatgtaagacarcaaacctaataaataaacgttttgtgttctggttgctccaacagccagccatttttctgtctcttttcctctctttgggcctccctactccctgagacac

SEQ ID NO: 23104 - DNA, 201 bp, Homo sapiens
tctgcttaggacacaagctgtactttatataatcagtttgtaaatacatttcaaagctcttcagttggtaagctgatagaattgtattactgtttagccayggaaggtaaacagttttttttaataaatttaaataaaaggaattaatttttttagatcatgaaatgctttattatttggtgtttttgatggatggccact

SEQ ID NO: 23105 - DNA, 201 bp, Homo sapiens
gttattaattaggctattttttattcaaaaatattaacttttatggaatacctttattttcccctatgaacttgagaaaaatgagtttttattagaggctrtagtataacactaactaaaatgtagtttggaaagttttattgagtttttcttccttaaccttttctttggctggctgcaaacaactagtgataatgtgtt

SEQ ID NO: 23106 - DNA, 201 bp, Homo sapiens
atggggatttttaaaattatttttttattgcggtaaaaaagcacataacataaaagataccatcttaactgtttatttttcttttctatcttagcagtttytaagtttacagtttagtagtattaagtatattcacattgttgcacagcctccaaaactttttcatcatggaaaacagaaaatctgtacccattaaacaac

SEQ ID NO: 23107 - DNA, 201 bp, Homo sapiens
ctggattaatgactagtcattatgaggtgtacttttatctttcatttaagtcaaaacttatgttgcattacatgctttacaaaaattgccacattattacrttatggtttggccataaataggagcaattttgggaaccatttattttgtgaatggttactgattttctgaatcattcaagttctacattctattaaattt

SEQ ID NO: 23108 - DNA, 201 bp, Homo sapiens
acagggtttgagttcgttgcagttgctagggacatacacctagggactgactactagggcaacctatgctgtcatgtcacattgttcataagtcttccgtsagcaaagatctgtcccaacaaatgccccatactcctttcacttccaagttattttctatcctaaacaatttttccttcctttatactggaaactccaaga

SEQ ID NO: 23109 - DNA, 201 bp, Homo sapiens
caacaaatgccccatactcctttcacttccaagttattttctatcctaaacaatttttccttcctttatactggaaactccaagatctataacattttatsataaacttgatcttattttatattatatatttgtgttcccatttcactcttctgttatcttactctaacacttaaatgctgtatgatcaaagttaactaa

SEQ ID NO: 23110 - DNA, 201 bp, Homo sapiens
aagtaaaattaaatagaatataaattagtattaatagttttgctccaaaatctcaggcagtaaagaggattatctatgatgtcatttcaaacaaatatatatacacacacacacacacacatcagaactgttcataagtatgtttttttcctctacaaatgtatagcggtcctttaatatgttctacaagtggttcatgtt

SEQ ID NO: 23111 - DNA, 201 bp, Homo sapiens
acaaacccacacattaaatacaaaggaaaaaaagtaataattgtcattaacttcttggcagaaacagtgcaaaccaggaggcagtggaatgctgtctttaragttcttaaagaaaaaactgttaatctagaattccctttcaagcaaaaatatcccttaacatatgaaagtgtagtaaagacatttgtctttcaaagactt

SEQ ID NO: 23112 - DNA, 201 bp, Homo sapiens
agttcttaaagaaaaaactgttaatctagaattccctttcaagcaaaaatatcccttaacatatgaaagtgtagtaaagacatttgtctttcaaagacttytgaaagacaaaattatcggacaaattaaacttgtgagaatttcttgttagccaacttgaacaacaccatgagaaatgataccaagttcttgaggctggag

SEQ ID NO: 23113 - DNA, 201 bp, Homo sapiens
tattatttttatgtccattttgaaagttactaaaatcaatggcatttttctggtaaacagttttttccaatttatacttaattgcctcacatataacatartttcatattggtaaattttaaatagtaaacagtaaacaaatgctgaggaaaacaaagcaagagacgaaatggaaaatgtgtaacagattttctcttataa

SEQ ID NO: 23114 - DNA, 201 bp, Homo sapiens
attgtattaggtattataagtaatctagaaatgatttaaagtatacaagaggatgtgcgtaggtcataatcaagtagataccattttatataagagacttraacatcctcagattttggtatctgcaggaggtcctggaaccaatccctcatgaataccagagaatagtattttattttttgagcaactaaaatgttgttt

SEQ ID NO: 23115 - DNA, 201 bp, Homo sapiens
ctccggctgcgtggaaatgctggccagggatctgagtccagaagactgtcccaatcacccagatgagtgtgcctttcagcatatttctgcacaggcaggaygggctgctaactgcagtgagagggcctggagttgagactgggctgcgttgggatctgctgtgtgaaggagactggccccgacttatttgctcatatcagc

SEQ ID NO: 23116 - DNA, 201 bp, Homo sapiens
ttacagaaaaaggtgaggaaaaagttaatgtctggggatgggaataaaatgagaaatggggtttagctgtctataataaaacaaatagaaaatgaagaccraagctttttctctgcttcgatttgtacttttcaatttcataatatgtttgtctaaatcagtgattatcaaaagggctctaaggtgtgcatctgagaatta

SEQ ID NO: 23117 - DNA, 201 bp, Homo sapiens
attgttagatgttttcaacctaagcttgcttatggaaaatggaaataaaacagaaagaggggaaaggctgggagaaaagagaagcaaagacctctttgaayactcagcccttcccactcaccctgtgcatagcacttcacatttttacttgactgcacaatctgtctgcttttcattggttttcagagtcctcgagtgatt

SEQ ID NO: 23118 - DNA, 201 bp, Homo sapiens
cattggtctgtgtgcctgtttttatgccagtaccatgctgttttattactgtagctttgtagtataatttaaaataactttgttttatgcttccagcttcrttcttttagctcaggattgctttatctactcagggtcttgtgtggatccatatgaaatttaggattgctttttctatttctaccaaagaatgcccttggt

SEQ ID NO: 23119 - DNA, 201 bp, Homo sapiens
atgccaggtaaatcaggcccgattaaaagtatgtcttttatagctgttaaatggttctgaaaaactaattctgaaggatttatagataatttattatttcrttttcttttgtaaaagttttggcaagtttttaatctgatattatgatgcttttggaagctaacagatgttgctctgaaagtcatatttctcacttaatta

SEQ ID NO: 23120 - DNA, 201 bp, Homo sapiens
ccaaagaatgcccttggtattttgatagggattgagttaaatctgtagattgctttgggtagtgtagacattttaacaatacttattctaattcatgagcrtgggatatctgttcattttttatgtgtgtcctctttagttgttttcatcaatgttttatatagttttccttgtagagatctttgacttctttggtcaaag

SEQ ID NO: 23121 - DNA, 201 bp, Homo sapiens
cccaaaggttttacagacgtgagccactgcgcctggcccgagtttatttcttaaaaacttatatttagtaatttttttgtggtcaaaggacatgaagttaraggatagtgtgtttagaactggctttgtaatggacttggtacgtaaaccaaaggaaaaaaaactagcctgctttctttgcctgtttctcaagaaatcggg

SEQ ID NO: 23122 - DNA, 201 bp, Homo sapiens
actaagaaagaaaatgcagccaattaaactatgatatgcattgtctctgatttctgcatttaaaaaatgaagaaatatgtttcctatagtcattgaaatayagtaagtcgttggttaggaaaggtaaggacctttctaaaggggaagaagcagagtagaggtgagagtgcatagcatgtagagcctgggttacaggctcct

SEQ ID NO: 23123 - DNA, 201 bp, Homo sapiens
tatttttagtgtatatattatagtttttagctttgtaattaccttgagtcttataaaaatattatattaattatttcaaactggtaccaacttaactttgrttgcaagataagaaacaaatgaaaagaaaaatttgtacaccttaacttcctctcctccaacattttgaatttttgattttacaacttgctgtttttatat

SEQ ID NO: 23124 - DNA, 201 bp, Homo sapiens
tagtaataaatttcctcagcttttttttttttttttttttttggcctgggaaagtctttatctggcctttatttctgaaggatagttttgctgggtacacwattcttcgttaagttttttattttctttcagcattctgaataatttcactccctccaaccctaaggttcccactgaaaattctgctgccaagtgtattgg

SEQ ID NO: 23125 - DNA, 201 bp, Homo sapiens
atagtattccatggtgtatctgtgccacattttcttaatcctgtctatcattgttggacatttgggttggttccaagtctttgctattgtgaatagtgccrcaataaacatacgtgtgcatgtgtctttatagcagcatgatttatagtcctttgagtatatactcagtaatgggatggctgggtcaaatggtatttctag

SEQ ID NO: 23126 - DNA, 201 bp, Homo sapiens
ggttggttccaagtctttgctattgtgaatagtgccacaataaacatacgtgtgcatgtgtctttatagcagcatgatttatagtcctttgagtatatacycagtaatgggatggctgggtcaaatggtatttctagttctagatccctgaggaatcgccacactgacttccacaatggttgaactagtttacagtcccac

SEQ ID NO: 23127 - DNA, 201 bp, Homo sapiens
atcttctgaaatctaggcggaagttcccaaacctcaattctcgacttctgcacaaccgcaggctcaactccatgtggaagctgccaaggcttggggcttgyaccgtctgaagccatggcccaagctgtaccttgaccccttttagccatgcctggagcggctgggatgcagggcaccaagtcctgaggatgcactcagcag

SEQ ID NO: 23128 - DNA, 201 bp, Homo sapiens
tgtatgttttgatggtacctgtgcattgctctatcatagtacttgtcatacagtatgctaattttccttgtaatatggtgttttatatgaagccaaatacygcccataccagtttgggattagttaacattctgctagggtttgcctttgtgtttcagtcagtcagatttttaaaaattaatataaattgtttaggaaata

SEQ ID NO: 23129 - DNA, 201 bp, Homo sapiens
tttgcaagtttatctcttcatcatagttccttcaagtatgcttgtcatttctgttttgaacagaaaaaaaaaatggagcaaaatcttgaagttgtaatatrgaagtttgaaccaggggtagaatactgaaacaaacatgttaaaagatggggtctaggcttcacattacgtacgtaacccttcaagggcctattctctatg

SEQ ID NO: 23130 - DNA, 201 bp, Homo sapiens
aaataggaggtcagtggctaatagagctaggcaaggaagttgaaatcacattatggaaaagtttagaatttagtaggcagtagagagacgtaatttctgartagaaaaaaatactgtcatgagattttacaaagattaatccctgctctgactggattagaagaaacagaaactgtaggccaggggtgcagggttcttcag

SEQ ID NO: 23131 - DNA, 201 bp, Homo sapiens
ggaagttgaaatcacattatggaaaagtttagaatttagtaggcagtagagagacgtaatttctgaatagaaaaaaatactgtcatgagattttacaaagrttaatccctgctctgactggattagaagaaacagaaactgtaggccaggggtgcagggttcttcaggaaagaaatataagacaagaagttaaactaaata

SEQ ID NO: 23132 - DNA, 201 bp, Homo sapiens
gaatagaaaaaaatactgtcatgagattttacaaagattaatccctgctctgactggattagaagaaacagaaactgtaggccaggggtgcagggttcttmaggaaagaaatataagacaagaagttaaactaaataaaaataagacaaggatatatatgagtgatattgtaatgtataaagaaaagtgtctcattagact

SEQ ID NO: 23133 - DNA, 201 bp, Homo sapiens
gtgctaaatgattggaacaaagaaaggagagattactctggactggaatgatcaagaaaagctatataaggatacaacttgaggtggactgtgaactctgkgtagaaacagagttagggttcgttttggaggttctaacaattgtaatatttttagtagttacaagtagagctctgtcattcccatcatctaattataatg

SEQ ID NO: 23134 - DNA, 201 bp, Homo sapiens
gtctgttgttataaatattttcaacattatgactgtttttgtcaggatgggtttttttaaagcaatgcataaaagtactataaatatacatttgttctatrtaatggccaactaaggaaacaaaagcagataaggtaaaagcacaagaaatgaggaaacagaaagaaggcaaacaggaataggcagaaggataagtactaa

SEQ ID NO: 23135 - DNA, 201 bp, Homo sapiens
tagggttttgcaatactaacttgtatttttccataaatgcttttctaatattttccataaattttccacaaatatgccttgatattttatatatatatagrattccttgactgtgtgtgacgtagtttaaaattttcctttttctaaaatttttattttctttttaatttggaagtctccattcttattaaaattaagtgc

SEQ ID NO: 23136 - DNA, 201 bp, Homo sapiens
cacataccaatagagtgagggaagaaaatttagaaacatactcatgactattttatgtaccattctttttaatgtacacttttgtgttgtatacaatataytaatacaagaaggcatgtgtatgctttctgactaaacattaaaaaatgggggaaaagtgctcacatagtttttactaatatgaatgaatgatcaaaaaac

SEQ ID NO: 23137 - DNA, 201 bp, Homo sapiens
agttctggaggctggaaagtccaagatcaaggtgctggcaggtttgggctcagtctctttgcatccaagatggtgccttgaatgccatattctctaaaggrgaggaacgttgtgtcctcacatagcagaagggtaagaaaaagggcaagcctttcttatagctgtattaatccattcatgaggctggagacacctctcatt

SEQ ID NO: 23138 - DNA, 201 bp, Homo sapiens
cacagctcctcttcttctcattgcccaaaatgtggtgaccagtgggcgtgtttcagtcctgtttgtgttacagctctttcagtcctgccatttggaaggtyctgagttcttgtccagcctttaggaagaatgaggtatgtggacagctggagggtgagcaaggcagagaggagcttcattgagcaagagaacagctctcag

SEQ ID NO: 23139 - DNA, 201 bp, Homo sapiens
gtgatcagaggtaaggtttaaagtctaccacttagacctggtttttaacttctcatcaaaataccacagtctgcattgagtgttctgatcaggcttgtttycttattattgaggtaacttactttgctctttctctgcacatttaaccatggtgttctttttattgagaaaaccaccccttttgggctcttatataaattc

SEQ ID NO: 23140 - DNA, 201 bp, Homo sapiens
ttaagtttttagattctaattgaagtctctatgccaatactttattactttttttggttcatttgcctttgagaattttcttagcatttttaatttacttyaataattgagcgattatgacaggaaatcatttcatgtaaaaaacagaccaagtattctggttcctagccagttttctttcatttagatatgatggtacta

SEQ ID NO: 23141 - DNA, 201 bp, Homo sapiens
gatgggaggtagaatatgtagcaaagttctcttaaaatgtctctgaaataaagtgatgtgagaaaccagacaaggcactttgtagtaatatcttgctttcwtaggagtttagctcagtaggaattaccagatacataagagatgctaatgatttgcagcttctagatgttatttcctctggtagtcttcatcaaattgaac

SEQ ID NO: 23142 - DNA, 201 bp, Homo sapiens
cacttaaaattatgtagtaaacattttacattagaatttgttggcaaaactttttaaatgactacaccaaagacttttatatggataaactgtaattggtygatccttctttagtctcaaatatttaggcttttgtctatttttccataccattgttataaagatatttgtgtgtaaatctttgcatttatgatttttaga

SEQ ID NO: 23143 - DNA, 201 bp, Homo sapiens
tctttcagcattttggaaggcagataaagcaagtgggtatttgtaagatgtcctaaagaagtgacttgctgtctttaggaagcaggggatctatttttggwgtatgtttgtactattcactgctttttcttggtagagaaagatactcaaccctctgttttgtggagttttgtatcttctttttattaatgcttctgttta

SEQ ID NO: 23144 - DNA, 201 bp, Homo sapiens
aagcataaacttagccatcaaagtgtatccctaataacgttttacatctttagtgaaatgttgcctctttaatctgtacctaaaccaatttcactatcttyctataatctataggcgaaaaagagcattagcttagaccatcaaaatgaaatgattcaggaactgggttcagaggcaaaacatttctcacccattttatgg

SEQ ID NO: 23145 - DNA, 201 bp, Homo sapiens
tggctaattttgcaaggcttgtacaaccctaattccaaaagatagcacaagaacagaaaagtataggtccaccacacttatcattacaagtgtgggaattytaaatcaaatttagtgaataagtccaatggtttttttttttttttttttttttttttgagtcggattctcaccctgtcacccaggctggagtgcaatggt

SEQ ID NO: 23146 - DNA, 201 bp, Homo sapiens
ccctccagccagagactcctgggaacatacacctggagtggaacaagttgggtttattcctccttgtatggaggggtaatgcacaccttgcagaactgggrgtgtcttagcaagaggatgttaggagggaattataagagctgagcttgtatgagatgatatgggggagagcttaagaaagtgggcattgtactggattgc

SEQ ID NO: 23147 - DNA, 201 bp, Homo sapiens
aagagctgagcttgtatgagatgatatgggggagagcttaagaaagtgggcattgtactggattgcttactttcaggaggcagagacaacgccatgattgrttatcttaattaaatcatctgtaaggagggaagaattgagtgaagctaatggtgtagttggtgaagaagcagtcactcttactagctggaactgggaata

SEQ ID NO: 23148 - DNA, 201 bp, Homo sapiens
ctggattgcttactttcaggaggcagagacaacgccatgattgattatcttaattaaatcatctgtaaggagggaagaattgagtgaagctaatggtgtarttggtgaagaagcagtcactcttactagctggaactgggaatatatgtttattttgtggcttggagagtgttcatattttgtccatacctgaatatgcag

SEQ ID NO: 23149 - DNA, 201 bp, Homo sapiens
tgcttactttcaggaggcagagacaacgccatgattgattatcttaattaaatcatctgtaaggagggaagaattgagtgaagctaatggtgtagttggtraagaagcagtcactcttactagctggaactgggaatatatgtttattttgtggcttggagagtgttcatattttgtccatacctgaatatgcagcggtct

SEQ ID NO: 23150 - DNA, 201 bp, Homo sapiens
atttactttttaactgtagaaaagagcttgatttgatttttttttttttttttttgagacggagtcttactctgtcaccaggctggagtgcagtggcacgrtctcggctcactgcagcctccgcctcccaggttcaagcaattctcctgcctcagcctcccgagtagctgggactacaggcgtgcaccaccatgcacagct

SEQ ID NO: 23151 - DNA, 201 bp, Homo sapiens
ctcttgaaaatttctatgtgttttctctctgaatatgtagaaattccatgtttgttctatgtagataggattaagatggaactgtgttctaaaaattgggytgttttttataaattgtccaaatttacattttcctaaaaaatatattaagaatgttagcttgcaacctcttttaaatccataatatgctgacatattatc

SEQ ID NO: 23152 - DNA, 201 bp, Homo sapiens
cactgcactccagcctgggtgacagagcgagactgtctcaaaaaaaaaaaagaagaagaagaaggtttcaagaatttagtttctaaattcaggatgtttcrcaattgagcaaagaatcatgatatttgctagtctttactgtcttgctcatgctaaatcaaattattttgactacttaaaattactgaaaagataagacat

SEQ ID NO: 23153 - DNA, 201 bp, Homo sapiens
ctatatgtttctgaaaaatgcccatcatttcaaaattgtatacattatttattttaaggttgcaggtggattattcttttgactaagtctatattataacyatatacatgtaattttacatcacagtttagtttctggtgtacctaatgctgatttctgttcccttcttatccttttacagtgacaaagatatggaaatta

SEQ ID NO: 23154 - DNA, 201 bp, Homo sapiens
acccaggctggagtgcagtggcactatctcagctcactgcaacctctgcctcccgggttcaagcaattcttgtgcctcagcctcccaagtagcttagtagrgacagggtttcactatgttggcaaggctggtcatgaactcctgacctcaagtgatccacttgctttggcctcccaatagaaaaagtaattttttttgtat

SEQ ID NO: 23155 - DNA, 201 bp, Homo sapiens
caacaaagcaaaagaagacaccaaaccgaccaacagcaaggagtaatattgaatattcaaaaataaaatctattccttgacttcaaatcattaaagtagarctgcctatttaagaacttttatttgcacagtcctattaattttaatgcctaaagcagtgttaatcgcatgacccacgtgaaaagattttaaaaattgctt

SEQ ID NO: 23156 - DNA, 201 bp, Homo sapiens
ccttccagcatttgaagctatgtcaccagtggcagtctttttgacttcatataccttccaaataagtagttttattttcaaaaagctgaatgctatagtartggtgtttatcaaatatgttaccaatatttgaagttttgataccatttcttatatgcagattgatcttcgtgtacaagctaaagctaaaccatgctaaca

SEQ ID NO: 23157 - DNA, 201 bp, Homo sapiens
cttctcattgcccaaaatgtggtgaccagtgggcgtgtttcagtcctgtttgtgttacagctctttcagtcctgccatttggaaggttctgagttcttgtscagcctttaggaagaatgaggtatgtggacagctggagggtgagcaaggcagagaggagcttcattgagcaagagaacagctctcaggagacctgaagtg

SEQ ID NO: 23158 - DNA, 201 bp, Homo sapiens
ctatagtagtggtgtttatcaaatatgttaccaatatttgaagttttgataccatttcttatatgcagattgatcttcgtgtacaagctaaagctaaaccrtgctaacaatatttaatgggtatacatcctgtatagaataaaatatttcctgaatttcattttccttttccagaattttatacatacatgctcatggaaa

SEQ ID NO: 23159 - DNA, 201 bp, Homo sapiens
tgttaccaatatttgaagttttgataccatttcttatatgcagattgatcttcgtgtacaagctaaagctaaaccatgctaacaatatttaatgggtatayatcctgtatagaataaaatatttcctgaatttcattttccttttccagaattttatacatacatgctcatggaaacacacacaagcacacctctctgtgc

SEQ ID NO: 23160 - DNA, 201 bp, Homo sapiens
attaggtatgcagtatgcattaagtctatgctatgtgttttacatatgatgtctagttaattttagtcaaatatgagcactttacatgtattttacacaayactagtgcattccttgtttaattgtgcaagtttagaagtacggtgtgtgtttgttctttcttaaaaaaattatgacgtatcatcagccagtgtagtagct

SEQ ID NO: 23161 - DNA, 201 bp, Homo sapiens
tgttttacatatgatgtctagttaattttagtcaaatatgagcactttacatgtattttacacaacactagtgcattccttgtttaattgtgcaagtttaraagtacggtgtgtgtttgttctttcttaaaaaaattatgacgtatcatcagccagtgtagtagctttattcataatttaagtgatactgtttcattttta

SEQ ID NO: 23162 - DNA, 201 bp, Homo sapiens
aagacctgtttgtaatgtttatagcaactttatttataacacctaaacaacccaaatgtctacctacgtgaatgaataaataagttgcaacatgtccatayagtgaaatactactcagtcatgaaaaggaacaaattattgatatatgcaaagatggataaatttcaaaagcattatgctaagtaaaaatagtcagatata

SEQ ID NO: 23163 - DNA, 201 bp, Homo sapiens
agacctgtttgtaatgtttatagcaactttatttataacacctaaacaacccaaatgtctacctacgtgaatgaataaataagttgcaacatgtccatacrgtgaaatactactcagtcatgaaaaggaacaaattattgatatatgcaaagatggataaatttcaaaagcattatgctaagtaaaaatagtcagatataa

SEQ ID NO: 23164 - DNA, 201 bp, Homo sapiens
gaacaggctgtggaatggcccttaaaacatccagagtctttcattcgaatgggtattcagccacctaaaggagttcttctctatgggccacctgggtgctmtaaaacaatgatagcaaaggctttggccaatgagagtggactgaattttctagctataaaggtaggatgttaaattttttaatcgctactctctcttggc

SEQ ID NO: 23165 - DNA, 201 bp, Homo sapiens
ttcttcttctgccagtttgattactgtgtgttgagagtgaaagcctgtctgacaattggttcccttcctcggatgtgccagcggggcaaaccgcccatctsgccatgtgaatcaaaacccagaaacgttgagaggttccaggcagccttttggttacctctctttttctcaaccctgctctttttccaacccccgccctgg

SEQ ID NO: 23166 - DNA, 201 bp, Homo sapiens
tcactacttctctgaccataactgatcactaaagccgctttgtcattaccatgtaagccaccacaaaacaacaatttatagctcatagaaaaatctatagmagcaggctgggctcgggggctcacacctgtaatcccaggactttgagaggccaaggcgggcggatcacaaggtcaggagatcgagaccatcctggctaat

SEQ ID NO: 23167 - DNA, 201 bp, Homo sapiens
tactagaggccccaagttacaaacattcacatttcaggtggtcactacttctctgaccataactgatcactaaagccgctttgtcattaccatgtaagccmccacaaaacaacaatttatagctcatagaaaaatctatagaagcaggctgggctcgggggctcacacctgtaatcccaggactttgagaggccaaggcgg

SEQ ID NO: 23168 - DNA, 201 bp, Homo sapiens
ccgccctaggacatacagacagctgcactccttcctctacacagaagaagtcacgttcatattgaggtccttgagtacccatgtttctcttttcattaacwctcagaagttctctaggtcatccctatctcatccaaccattagtgatctggtcaaaactctgtccaagttttctatatctcaagtttcgtagttctccaa

SEQ ID NO: 23169 - DNA, 201 bp, Homo sapiens
gactggctaattatttgtagtgtcctggttacatttccctcagttactggcagtatattgctaagtaaatgtgataggaaagtaagagtggcagaagaagrtgaccttattgactagttcttcagagcatcctttataaataaaaagaaacagagtaatgtttattgaagcaagtgttgaattcaggcagtgtttctcccg

SEQ ID NO: 23170 - DNA, 201 bp, Homo sapiens
taattcttccattatctcagtgggcaattgagtcatgtcctagcttcctcttttaggtggaaacttgacaggcctagaatgtccacagtggctcacctatrtgtctggcttatctgggactttctcctgtagcaccttcgaactcttccacatggcctttctacagcatgggcttctcacagcatggcagccgagttccaa

SEQ ID NO: 23171 - DNA, 201 bp, Homo sapiens
catctgtagatggacatttaagttgtttccacatcttggctcttgtgaatagtgctgcatgaacgtgagggtgctaatatgtctttgagatcctggttttrattcttcttgacaaatacccagaagtgggattgctggattaatatggtaattctattttaattttttgaggaacgttcttactcttttccatagcaggtg

SEQ ID NO: 23172 - DNA, 201 bp, Homo sapiens
agagcagcaccaaggggaacattctcccccatggtccaatcacctcccaccaggccccacctccaacactagggattatgatttaacatgagatttgggcrgggacccaaaccatatcatgggttattggggtattttttaaattgagttgtaggggttccttatatattttggagactaacccctaatattggatacatg

SEQ ID NO: 23173 - DNA, 201 bp, Homo sapiens
gagttttacagctttaagtcatatgtttaaatctttaatcctttttgagttgatttttgtatatgatgtaagataagggtccaatttcattgttttgtttktgggtatctagttttcccagcaccatttatttatttatttgttttgttgagtcatctctcctttttctttttttcttttctttttttaaattatacttta

SEQ ID NO: 23174 - DNA, 201 bp, Homo sapiens
gcttcctgagtagctgggactaccagcatgtgcccctgcacctggctatcaacaggaacttagaaggtggaaggagaaagaggtcaggatatgtattccckctccctccctgccctagaacctcaattctagtattggctgtatccctttataactgtatctcttgtcctttgagccttcaccccacttcttcaacagctt

SEQ ID NO: 23175 - DNA, 201 bp, Homo sapiens
ttacaacctgtctcctttttaccaccaaagttcttaaaagtctagcacacctactgcctctacttcctcactcataattcgcttctcaaaccctggcagtmtgggctttccctccctctgcacactgctaagctgacctcactatttccttctctccaattataataaccagctctaagtcctcagctttcctgacctttt

SEQ ID NO: 23176 - DNA, 201 bp, Homo sapiens
actgtgagtcaaacagaaacaagttttaattaagactatgcaagcaaagaacctgattgtatattttaacttgttgattattcgatttagtaaaacaaacsgtcattactatcagattttaaaataatccctcaccacagggtaattgtttgaatctacctatcaaggtagttaaggtatatcatccatcctcctggatat

SEQ ID NO: 23177 - DNA, 201 bp, Homo sapiens
gcagttagttgtttgcgtgttgatctttctctactttttagtgttcttaaaggtaaggaccaagtcatatgcttctgtattttcctcacagtgctttgcamaaaaaaaaaaaattgtctagtaggtgtctttttagttacttttaaagtatcttgtgggtagttaagacttttttattcaaattttatataaaatctgttt

SEQ ID NO: 23178 - DNA, 201 bp, Homo sapiens
agtatagtaacatgccttacaggtttgtagccttgctgtatagtaggccataccatctagattttcataagtagactctttgatgtttgcacaatgataaratcacataaagacacatctctcagaatgtatccctgtcattaagcaatgcatggctgtatctagaaaaagtaaaaaaaaaatttttttttttttttgaga

SEQ ID NO: 23179 - DNA, 201 bp, Homo sapiens
tgatttgcaaggcttagaaatgtaatgaagaaatagctataaaccttgtgtgctttgtgcatcaaggaatttaggtgcatgttgctttcccatttacttaytctttttaggttcttcagcgaaataatgcaaaaaacatagctcatggaattaaagaggaatacttaagcaggaaaaaaaataaagattttaaaaagaaag

SEQ ID NO: 23180 - DNA, 201 bp, Homo sapiens
ctgcactgtgcaaaaacagggagatatcagtcatatagcaaatgaaatagtacagtaattaatatttgtccactcacatagtaggtgctcaataaatgttyccaaccattatgtgccaggctctctattctctgagggagtctcagctatgaggggtgggggaggtatgcaggagagagaaagagagctccgtcacctggc

SEQ ID NO: 23181 - DNA, 201 bp, Homo sapiens
catgaaaatgtaaaagataaaatagtagagcatgacaataactatttagtctgaaaaatgatttatcattggtggatatttaaaaaatgccaactctgtgrcctttactacatgtataccttctgtggggaagggtactccctaactgaacattttgtgaattgattaatgtttaatattgatttgcaaggcttagaaatg

SEQ ID NO: 23182 - DNA, 201 bp, Homo sapiens
actgaccatcattagtagcctttgtaaaacctttaaaattctattgtgcaccatggggaacagaatatatacaggttgagtatcactaatctgaaatccasagtgctccaaaattcaaaacttttgagtaccaacataacacacaaaggaaatgctcattggagcattttggatttcaaattttcagattacaaatgttca

SEQ ID NO: 23183 - DNA, 201 bp, Homo sapiens
ccatctagatttgtgtaaggacagtctgtctacacaacagtgaaagcacctaacaatgcacttctcagaacatatccctgttgttgagcaacacatgactrtatgttactgcactgtttgtaaattttctgaagttgtgctccattccagtgcagtttttttctatgacaatacaacaaagaagctcctgttcctgtggga

SEQ ID NO: 23184 - DNA, 201 bp, Homo sapiens
atgtgtagttcctgaaatactttaatagcagaatctttcccctccatcaaataaagccgtatgtgggaagcctattatattggatctactttggtggggtscctgtcctgcatgcctcttcctcctgcccgggcatgctgcatcctgtgaggcaccttggagattccacagagcagtttaaaaactgttactgtagcaaaa

SEQ ID NO: 23185 - DNA, 201 bp, Homo sapiens
tttgtctccttggcttattaggggctagtatgcattgcaaacattgcaacagatgtttacttattatttgggtacattaagttgtgctatgtttattacaraatcagtctttgtactttacttttttggagacagggtctcacctgtcacccaagtttagtgactgagtgcagcagcatgatgatggctcactgcggtctt

SEQ ID NO: 23186 - DNA, 201 bp, Homo sapiens
ctgaaggctgagttcatggatgccacctggcactgaggtgggccttgaattcaggaccatagtggtgggtctagagcctgagaccagcctgggtctacagwggctggttcggaatttggggctgcaggtccaagcctggctcttgtgtaggcctagagcctaagtctgcagggatccatcctgggctgtgggggctgacct

SEQ ID NO: 23187 - DNA, 201 bp, Homo sapiens
aaaataatacatcttttacgtgaactttttgaagacccctcatatattaaacctcttaatattgttgttattaagggacctgtgtctctgaggatgtcatktttttttttgtcaatcttttttgtttctatgcttactttgaatggttgttctgtctccaaatttactgatttttttcttcagcttgtaagcttatttagt

SEQ ID NO: 23188 - DNA, 201 bp, Homo sapiens
tagtgtccagaattttactggaggttagtcacgttggtatactacagtgctggcgtgactgacctcagctatccagattccagtacttcccagggcaaaarcaagcattcaccataaatcacactgtcagtataaacttatctggtcagattggtacagcatggcccaaggtacatacatactgggatattgtgcctgata

SEQ ID NO: 23189 - DNA, 201 bp, Homo sapiens
ggggagagacacagagagaaggggtgggtgagcagccaaagcaggtgtccccacaattgacttgccaccaagggaatgtgggtgaatgaccaaggcaggcstccctgcggtgatcagacaccaatgaaatgtgggtgaataatcaggcaggcatccccgcagtgattaaacaccgagggaagactgtcttctcaagtctgt

SEQ ID NO: 23190 - DNA, 201 bp, Homo sapiens
ctttcagggcttccagatgagcttggaaactgatttacagagataattaagaccatttgccatgaacttccttatgtatccccatcattaacaagacatarcttggctctattattatctgctgctcctttcctacactgtcagagaaggacattttttgcctaaagttaattgttccatctagtttctgtagctcatctc

SEQ ID NO: 23191 - DNA, 201 bp, Homo sapiens
tcttttccttcttttttttttttttttttttttgagatggagttttacccttgttgcccaggctggaatgcagtggcgaggtctcagctcactgcaacctmcgcttcctgggttcaagcgattctcctgcctcagcctcccgagtagctgggactacaggcgcccactaccacacccggctaaatttttgtatttttagta

SEQ ID NO: 23192 - DNA, 201 bp, Homo sapiens
tgtgggacattatccttcatatagacctgttttcataaatctgctctgatgaattctgaaatatggaggctactgcattttcaattaaaaatcttaaaggsaatactttaagacaaaagagctaagtaattcaaacaagtattaactaatatggtagtttcatggtatcagaaattcagattacttctgtgccatccctta

SEQ ID NO: 23193 - DNA, 201 bp, Homo sapiens
acctaatttttcttctatttctttgtcctccttgactcctttacatatttattctggtctgcctagccacagaatgttgcagtttgtcaaggctgggcacrggacccatcttctctcatccacatccatggcttcagttgtcagctgtgattcagtgcctaattcagctcagatctttgctctgaccgattcaaccatcta

SEQ ID NO: 23194 - DNA, 201 bp, Homo sapiens
ttaatttctttaactgacacaggcctattcaatttgtttattcttgtgtgggttttggcagattgaagtttttaaggaatttattcatttcatctaggttwtcaaattttgggccataggatgtcttagttttttaaaattatccttttaatatatatagatctgtagtgatgtgtcctctgtcatatctgatattaggaa

SEQ ID NO: 23195 - DNA, 201 bp, Homo sapiens
gtggtgcaatcatagctcattgcaacctcaaactcctgggctcaaaccatcccccacctcagtctcccaagtagcagggactataggtgcaggccacagtkcccagctaatatatatatttttttaatttatgtagatatgaggtctctctatgttgctgaggctggtttcaaactcctggcctcaagcagtcctttcacc

SEQ ID NO: 23196 - DNA, 201 bp, Homo sapiens
tttattatttctttcgttctgcttactttagcttgctcttctagttgcttaaggtgaaagcttagtattgattttagatcttctctaatatatactctcartactataagttttgctttaagtactgctttctctgcattgacaaattttgataagttctattttctttgtatatttatagacaatagaactttgataagt

SEQ ID NO: 23197 - DNA, 201 bp, Homo sapiens
tgaggctggtttcaaactcctggcctcaagcagtcctttcacctcagcttcccaaagtactgagatgacaggcgtgagacacgatgccaggttcagttctrtcagttttgataaatgcatagaattgggtaaccaccaacacaatcacaatgcaaaacaatttatttactccaaaaatttattcttgcagccaccactggt

SEQ ID NO: 23198 - DNA, 201 bp, Homo sapiens
cactggtgggatgtcttctttccaccactgacccctggcaactactgatctgtcctgtagttttgcccatttcccaaatgtcatataaatgtaatcatgcmcatgtcatctttgagtataacctcttttatttcacatgttttcgagattcgtctgtgttactgtatcagtagtttgttccttttttattattgggtatta

SEQ ID NO: 23199 - DNA, 201 bp, Homo sapiens
tgaaagttttgaaccttctctatagaaaaatatataatatgtatacatgggtgtatgttttcataagtttcaatgtattcttagatccatctagatatccrtagactctcagttaagaatctttactatgtggccaacaaacacacaaaattagtgaaataccaattgaaatagtatctagttcatgtaacaaagattgct

SEQ ID NO: 23200 - DNA, 201 bp, Homo sapiens
caccagttcttatgggaactaagagtgaaaacttactcactcctggagaatggcaccaagccattcatgagggatctgctgccacaatccagacagctctyacctaggccctacctccaatattggggatcaaatttcagtgagatttggcaggaccaaacaaaccatatccaaactatagcaagacagaaaggtaaataa

SEQ ID NO: 23201 - DNA, 201 bp, Homo sapiens
agagaatgagagccaagtgaaaggggaaaccccttataaaaccgtcagatcgggctgggcgccgtggctcacgcctgtaatcccagcactttggcaggccraggtgggcgaatcatttgaggtcaggagtttgagactagcctggcccacatggtgaaacgctgtctctactaaaaatatagaaattagctgggcgtggtg

SEQ ID NO: 23202 - DNA, 201 bp, Homo sapiens
ttttctgtgggatacttattaaattaaggttgagccatttttaaaaaacgtattttctctgtgaggaaaagcaaatctgtcttaatgagttacatgaaatkatatgaagttatatgaaatctaagggatttgaaaatttcaaaaagatttaaaggaaatacatcagaattttggttgcatttcagttaacagatttattta

SEQ ID NO: 23203 - DNA, 201 bp, Homo sapiens
tctgtgggatacttattaaattaaggttgagccatttttaaaaaacgtattttctctgtgaggaaaagcaaatctgtcttaatgagttacatgaaatgatwtgaagttatatgaaatctaagggatttgaaaatttcaaaaagatttaaaggaaatacatcagaattttggttgcatttcagttaacagatttatttatct

SEQ ID NO: 23204 - DNA, 201 bp, Homo sapiens
tgataaaataaaacaaaagcatgaatacttgacatatttctctcatcactaagacaacatgccagttagtcaattaaaaaacaaaaataaatgtatcaaamcacgtggtattatgtggagaagacttgatcccaaatgttcccttttctcgaagttatttgctgttgtccatactatccacgctatccaagtttacctgga

SEQ ID NO: 23205 - DNA, 201 bp, Homo sapiens
ttccattggaacatttgttgatgtgtgtggggggtttaaattccacaaatattattaaaatgagcaatcagcagcaagatgttttaaaatattttgtttcmgcatgtaaaatctcgttttattacagaattattttgttaaaggcacagctatgccaggttgctgccagagtgataggatcataacagcccagttaatttt

SEQ ID NO: 23206 - DNA, 201 bp, Homo sapiens
aaaagcaatataattctattacatatttatcttaacaagtaacattttaaaagtccatgtaatttatagatttatttgctttctctaacaagtaatgcttytaataaaaatctgggcctggtggggtggctcatgcctgttatcccagcattttgggaggctgaggtggacgcatcacaagatcaggagttccagaccagc

SEQ ID NO: 23207 - DNA, 201 bp, Homo sapiens
tggtctcaaactcgtaggctcaagcaatcttcctccctcagcctcccaaagtgctagaactacaggcgtgagccactgcacctggcctgagatgtcttttrtacaccagattttgaagactattcaaaaacaatgtaaaatatttttaaacaattgttaacattgatttttaaatgatgatattctggaatattggattga

SEQ ID NO: 23208 - DNA, 201 bp, Homo sapiens
gatgatattctggaatattggattgaatatattacatttgttttacttttttaaaaacctttaaaatatagtttcttaaaaaatgtaaaaatggccaggcrcagtggctcacacttgtaatcctagcactttgggagaccgaggtgagcagatcacctgaagtcaggagttcgagaccagcctggccaacatggtgaaacc

SEQ ID NO: 23209 - DNA, 201 bp, Homo sapiens
attcagtgcagtgttggagataggattacagtgtagatgcaacaaaattggtcatgagttggtcattgttaaagctgggtagcaggcgagtgatttcactstatactgttctctgtactgttgtatgtgtttgaattttctatcgttaaaaaatattaagaagaaaacaaatagcattatcttttccctaagtgttcacaa

SEQ ID NO: 23210 - DNA, 201 bp, Homo sapiens
cagcctggccaacatggtgaaaccccgtctctactaaaaatacaaaaaaattagacaggcatagtggcacgtgcttgtaatcccagctactcaggaggctraggcaggagaatcatttgaacccgggaggcggaggttgcagtgagccaaaattgcgccactgcattccagcctgagcaacaagaacaaaaactccatctc

SEQ ID NO: 23211 - DNA, 201 bp, Homo sapiens
aaaaaaaatcaaacctgaaactccccaagcctctagatcttaatacaagttaataagaaatacaggaggcaggagatgttaaataacaccagagggatgcrggaagcaaaataaggaatatgggagactggataggatatataattctgtttcttgaacataaattttaagggaaaagagaaagagaaatcccttagatat

SEQ ID NO: 23212 - DNA, 201 bp, Homo sapiens
aggatagcatcattttgcagcccttcatgaatcaaaagacctggacaatcataagtggctactaacacatgaaaagaagagcagccatacattatgtgcawctcagcaatacctatgaagtacttgttcaaaaaaaaaaaaaatcaaacctgaaactccccaagcctctagatcttaatacaagttaataagaaatacagg

SEQ ID NO: 23213 - DNA, 201 bp, Homo sapiens
acacccactcccaccgtaatggcattaatccattcctgaggattaatgttgttacggtctcatggcctaatcgcctcccagtggtcctacctcttaatacmataaaaatatcaattaaatttcaacatgagttgtggaagggacattcaaaccattgcagttattttagagctttagttcagaaatacaaatgcaataact

SEQ ID NO: 23214 - DNA, 201 bp, Homo sapiens
aaggatcctgagcagaacaaagtcccacaacctatgtgcacgaatatggcagccgctactacagctcaggcctagggcaagagggaagggacactatgcaracaaggcagtgccctcaagaagtccccaaatcgcaatccactcctgtacttgtgcttacaagggcagagacactctgcctgagttcagatgccagcagtc

SEQ ID NO: 23215 - DNA, 201 bp, Homo sapiens
tgacattcatgtagagagggattgtgaacctaccccaaagtgctccagaaaggccatccataggtgcaccccagccaagctcctgtggaggagtcccagcsacgtctgcagtgataggcaaagggtagaagtccccttctccaggtcccttcacgagcactggggctgcccaactgctggggtagaatgacagtctttcta

SEQ ID NO: 23216 - DNA, 201 bp, Homo sapiens
ttttaaaaccatcatatctcatgagactcattcactatcacaagaacagtgcaggaaagacccacccccataattcaatcacctcccaccgggttcctccyacaacacaagggaactgtgggagttaaaaatcaagatgagatttgggtggggacacagcctcaatgatccatctactgctgttggtggagcgtttaagtc

SEQ ID NO: 23217 - DNA, 201 bp, Homo sapiens
aaatcttttgtttttgcgccttgatgtggttgccttttagccaaatgcttctcaagctctctgtggtgaagactttaaaatttataataggtcacagatcrgcacttttctaaaatacagtaaaaatgattttctagaaaaataaggaaaaatttttattaaacagatgtgaaattactctgtaaatttcaataaaagctt

SEQ ID NO: 23218 - DNA, 201 bp, Homo sapiens
aggtgttgttaactggcctgaattctggaccccctttttcagccaaaagttgaaatcactagtggtgtgtgttcgtataaggaagacgacttctgttactmtctttacgtattcttggtaatacaaaagaaaaagatctggtgaccataatgtggggcagaagtagaaacataacttaatcctctagagccagatagatgt

SEQ ID NO: 23219 - DNA, 201 bp, Homo sapiens
tttgaaaatatttacgatacctgtttttaagatcttgtttgccaattttatcacttcttttatttctatatctatttgtattgaactttttttctccaatrtttttatatttggatcaagtttttgtttatttctttaagatctctaaactttacagaaaatttgcaagaacagtcacaaacatttttttcttcaaccatt

SEQ ID NO: 23220 - DNA, 201 bp, Homo sapiens
caatcttccttaggttttctttagtatttttacagtttcagttcttacatttaagtatttgatccatcttgagttctttttttatacagtgagagacaagrgtccaatttcattctcctgtgtatggcaatacaattttcccagcaccatttattgaaaaaggtgtcccttctccagtgtacgtttttgtcataaaagatt

SEQ ID NO: 23221 - DNA, 201 bp, Homo sapiens
tgatatatgatgatatgttaggcttatttattgagtcaatgcttcacacctgttctgtgtcacaacacctcccttagaggataaggttttttttttttttwaaaaagcgattctttcttgtaatgccacaggcattataaatctctcaattgaaaaatactgaattaaatttgcttcttatttaaaactacttaagggtaa

SEQ ID NO: 23222 - DNA, 201 bp, Homo sapiens
tgtctcaaaaaaaaaaaaaaaaaaaaaaaggagttccattccaagagggccaaataggaacagctctggtctgcagctcccagcatgatcgacacagaagwtgggtgatttctgcgtttccaactggggtgactagttcatctcattgggactggttggacagtgggtgcagcccacggagagtgaactgaaatagggtgg

SEQ ID NO: 23223 - DNA, 201 bp, Homo sapiens
tgtgagggggttctagagcccagttgaaaaaaagtgggagtaagtgattggtgtcgcatgctgctgatagattaaatagattgagaactgaggattgaccrtaggattagtgaccttgacagagcaattcagtgggggagtgttcagaagtgtcatttcaatgggtttaaatgagaatgggaagagaggaaatagaaaatg

SEQ ID NO: 23224 - DNA, 201 bp, Homo sapiens
atcattgttactcttgggttacaacctgtctcctttttaccaccaaagttcttaaaagtctagcacacctactgcctctacttcctcactcataattcgcytctcaaaccctggcagtatgggctttccctccctctgcacactgctaagctgacctcactatttccttctctccaattataataaccagctctaagtcct

SEQ ID NO: 23225 - DNA, 201 bp, Homo sapiens
atttgatttatacattatttaatttcctcctgaaaattggaagcaggactttcaggaatagaagtcagtatttttcatttgttttagaatacttctaggtstaatataatcatcagtggtagatgtcagcatgattagggggtgacttaaggtaaagcaaataaaatgtgaatacaaaggaaaattatttgacaatggaga

SEQ ID NO: 23226 - DNA, 201 bp, Homo sapiens
accgacacacatattcttcctatcatctctttctccttccttcccttcttctcttcctcttcacacacacatacctcattttgaatttggcaattatgatyacttacagtaaaggtaagcggaaatacattttaattttcctttgtcatttctctcctccctgtctgctttccctttcctctactgcctttatatagaatg

SEQ ID NO: 23227 - DNA, 201 bp, Homo sapiens
attatgaagattggaaataatatatagggtacttagtaaataatagctattggtgttattctaccactactttttttaaattaataaactgtgtactaccrccattttaattaataaagttcggttcctttacaaataaacattagttttctatccctgctgtaacaaattgccatacacatagtagcttaaaacaacaaa

SEQ ID NO: 23228 - DNA, 201 bp, Homo sapiens
agtataatatatagaaagtctgatccctctttttaaataatatatagaaatccaaactttatcagtgtaaacatactgagtttgaggtgtctatagatcakcttaatggagatgtcatacagattagttttcatttttaaatttctccctatttcattgaaaatatgattcactatataaaattgtaattaatatagatat

SEQ ID NO: 23229 - DNA, 201 bp, Homo sapiens
ctacgttaacattgggttttactgtacattatgcgtagtataatatatagaaagtctgatccctctttttaaataatatatagaaatccaaactttatcartgtaaacatactgagtttgaggtgtctatagatcatcttaatggagatgtcatacagattagttttcatttttaaatttctccctatttcattgaaaata

SEQ ID NO: 23230 - DNA, 201 bp, Homo sapiens
ggagaatgttttcagagcttatagtaacagtttaatgaacaataaaaagcagaagggacaggagacaatatgttgagtaccggctgtatacagaagctttktatatattgcatgtatgtatacacacacacacatttacccttttctttttaaacagatgaaatagtctgaggagaacttgcctaatattttatgaggtag

SEQ ID NO: 23231 - DNA, 201 bp, Homo sapiens
atttaagaagatttgaaatatagttactatagagcagtgattcctaacccctttttggttttggatcctttttagactataatgaaagttttgaaccttckctatagaaaaatatataatatgtatacatgggtgtatgttttcataagtttcaatgtattcttagatccatctagatatccatagactctcagttaagaa

SEQ ID NO: 23232 - DNA, 201 bp, Homo sapiens
atgaacaataaaaagcagaagggacaggagacaatatgttgagtaccggctgtatacagaagctttttatatattgcatgtatgtatacacacacacacakttacccttttctttttaaacagatgaaatagtctgaggagaacttgcctaatattttatgaggtagttaatagtactgttgagattaaactggattattc

SEQ ID NO: 23233 - DNA, 201 bp, Homo sapiens
ggctttccatccctagcagttcagccctaatatacagcagatgtcacaactgatttcacatatttggagaaataggagtagctgagacagaatttagtctrccttgctcagagacattcacagatagtgtgaaaaccactcatgagtcccctttgcttaaagttaccctggtcatgtttattacagcatgtaaaggtacat

SEQ ID NO: 23234 - DNA, 201 bp, Homo sapiens
caaatgatattttcatggctatatgtttctgaaaaatgcccatcatttcaaaattgtatacattatttattttaaggttgcaggtggattattcttttgaytaagtctatattataaccatatacatgtaattttacatcacagtttagtttctggtgtacctaatgctgatttctgttcccttcttatccttttacagtg

SEQ ID NO: 23235 - DNA, 201 bp, Homo sapiens
ggaagtaatgtgctgggcacatgaacagtctcaccattaagtttttatctaatgtgtttatccttaggatgaggccaaggacaaagtacaaccatcaaagratcccttccaaacctatctttacccattagttaaccccatctagacaggattgtaatttctaagtattcacatgatcccaggtaaatcaacatcaaaacc

SEQ ID NO: 23236 - DNA, 201 bp, Homo sapiens
tggacaggtctgcaggatgtgcagtggcttgggctctgctcttagcttcagaggggagtgatgttgcgtggagctgaactgaacttcctctggtctcccaraagcaagtgcaagcaccagctctgatgagggtggcaggggagcgacatagactctgtaagatttctttggttttaaatagccctagtgtggctcagtgag

SEQ ID NO: 23237 - DNA, 201 bp, Homo sapiens
gaggaaatagaaaatggaaaatgaagagagctcttccaaggagagttgctaatgggaatgaaagcagatatggagacaaggaagggactagattacatctrtaaggtgagaaattacaacgtgtttttatggtggtggtaaagcttgactcaggtaaaaggaaatggaaccccatgcataaatagaaggattgatcttggc

SEQ ID NO: 23238 - DNA, 201 bp, Homo sapiens
ccagcctggtcttaaactcctggcctcaagcaatcctcctatctcagcctcctaaagtgttgggattacaggcctgagccactgtgtctggcctctgtagwtattttaatatgagcagctgcctcatctccccaaacacagattctctagggcagagatcagttcttgtacttcttaaagtctggcaaaacagctgtctca

SEQ ID NO: 23239 - DNA, 201 bp, Homo sapiens
ctgttgggaaagacagacagtaaacaaacacacaaatacacaataaagaagaatgggtagaagtgacaggtttaagagagatttaagtagtgttagccagrtctatgcattagttggatttagaggaagaaatagatacctagaataaatccaaggtttctttgagataattcagagccgttaccaaagatccacctttct

SEQ ID NO: 23240 - DNA, 201 bp, Homo sapiens
caacataaaattaatactggcagacttgaggcacaatagtactggtgatgctgtgagtgagtggtagagaaggagtggtctcttgagcccattgatgaagsctggcggtctggggaagtgaatctaagtccaagtgtacagaattcatacttaacctctttggaaaagggcagactcctccacatcagagctactccttga

SEQ ID NO: 23241 - DNA, 201 bp, Homo sapiens
ggactctgttcagacatgttttaacaagttagtatgaatttattttggtgcaaaaataactgaaatccatgcataatttttaaaataatacatcttttacrtgaactttttgaagacccctcatatattaaacctcttaatattgttgttattaagggacctgtgtctctgaggatgtcatgtttttttttgtcaatcttt

SEQ ID NO: 23242 - DNA, 201 bp, Homo sapiens
tttgtaaactgctatctcattagggcattgtctcatgaacttttcataaagcatcaatagttttaccatttttctatccaagcttcaccataaatttgctkcttcttgcttcaattttaacaaaattcatgtggctctgacaaactgttttcaaactggtatcttacccttagtgcctcaaactggactctgttcagacat

SEQ ID NO: 23243 - DNA, 201 bp, Homo sapiens
gaaatccctcatcttctgcgttgctcacgctgggagctgtagaccggagctgttcctattcagccatcttggctcctccccactattttgaatgttttctrtgttatcttttgagataatctagtgtttcttagtctgtcaatatgaattatattaattgattttcaatgtttgaatcagtcttgtagtcctggaatgaac

SEQ ID NO: 23244 - DNA, 201 bp, Homo sapiens
agatttctttaacagcggttataatagctaacatttattgaatacttaagtggcatgcagtgtcttgaatgcttatgttaaattatatatcttcccaatarcaaccacatgtatctgattatcaaagaattttcctcttgattacttttgtcattcagatatttattaattcttccattatctcagtgggcaattgagtca

SEQ ID NO: 23245 - DNA, 201 bp, Homo sapiens
agagcaaccccaagacacataattctcagattcaccaaggttgaaatgaaggaaaaaatgttaagggtagcctgagagaaaggtcagattacccactaacrgaagcccatcagactaacagcggctctctcgggcagaaatcatacaagccagaagagagtgggggtcaagattcaacattcttaaaagaattttcaaccc

SEQ ID NO: 23246 - DNA, 201 bp, Homo sapiens
ataatccattctctttgtgtatgtatgtatgtaatgaaaatagccaccgtgagctcagtaaacccctccttactaaatgtacacaaaagtccattttcagrtgtttgttatttgtgaaacttggttatgtacaatatcatgaacatataaacttcccccttcatgctcatttgctgtttaccaatatgattccccttgaga

SEQ ID NO: 23247 - DNA, 201 bp, Homo sapiens
cagaagctctaaaatagaaggctcaattgttccttaattgaaaatgtaaaacattcaggtagaaataaaaaataaatggaagaattggatgatcaagttgmaagtctcccagaaagtcaaacaaaaagacaaagagatgagaattgtagacatggtaacatctgactaatagaggtctcagaaggaacaaagaaatcagaa

SEQ ID NO: 23248 - DNA, 201 bp, Homo sapiens
gccagttagatctggaggatacccagatcccaacatcaagaagtactccttataaaccaattgatgacagaattacaaataaagccagtgatgttttgctkgatgttacacagagccctggagatggcagtggacttatgctagaggaagtcacaggtcttaaatgtaattttgaatctgccagagaaggaaatgagcaac

SEQ ID NO: 23249 - DNA, 201 bp, Homo sapiens
acaaggtgtcttatttttgtcttctccacctttatctccctcacaatgcctagcatagcaccttatatagagttattgtcattaaataaacaaatggagaytttacatctcaaatatataaactactttctgtaactttaacatttacctcatgagcccttggataaaaataaattgggactattaaagatgtcttttgta

SEQ ID NO: 23250 - DNA, 201 bp, Homo sapiens
atacaagctttacatctgtacaaggtgtcttatttttgtcttctccacctttatctccctcacaatgcctagcatagcaccttatatagagttattgtcaytaaataaacaaatggagactttacatctcaaatatataaactactttctgtaactttaacatttacctcatgagcccttggataaaaataaattgggact

SEQ ID NO: 23251 - DNA, 201 bp, Homo sapiens
ggggacactgcagtgacagggaggagccgattgggacaggcccttcctgggagcaggcatgcaactcatgatgtggcagtcaggagcaaaaaaaacacctycttttctttaaaatgtaaaaatttgcttactatagtggtttttttattgcaatcttatgaatgtagctctagaagatctttttaaagcaattcattagag

SEQ ID NO: 23252 - DNA, 201 bp, Homo sapiens
ttggtctgaataggtaggcagttcacacagttgttttaggaaaattattatttctttaaaagtcttaaagttaataaacaggagatttaggagacgttaaktaatgcttaagataaaaggtttcatttctctctctctgtttctctgtcttcacacagaaccttctacatggtgtgtgtttaacaagcacttgataaactg

SEQ ID NO: 23253 - DNA, 201 bp, Homo sapiens
ttgttttggtctgaataggtaggcagttcacacagttgttttaggaaaattattatttctttaaaagtcttaaagttaataaacaggagatttaggagackttaattaatgcttaagataaaaggtttcatttctctctctctgtttctctgtcttcacacagaaccttctacatggtgtgtgtttaacaagcacttgata

SEQ ID NO: 23254 - DNA, 201 bp, Homo sapiens
ggcgtgagccaccatacctgtccttaaaccatattttagtagttatttaaggaagttacaaaaaaaattccttttgatataatgagtgcaaattatttgcrcatttttgaaaagagaatagtcatcttttattcacctgataattgctgagaagggcaaacctcccataagtactgcttttctattttttttttttttttt

SEQ ID NO: 23255 - DNA, 201 bp, Homo sapiens
aggtaccttttgaagagaaattttgttttgatttttgtaaagaccagtttgtccatgtttttcttttatacttctagaagttttatagttttagctcatamatttcaagtttatttttcagtatggtgtgaggtaagggtcaatgttcatttttttcatatggatttctagtattcacagtaccatttcttaagataattt

SEQ ID NO: 23256 - DNA, 201 bp, Homo sapiens
gggtgagaaatgctatacttgaacttggacttttttctttgatgtgcaattaaatgattagaaaataggaagttaaggtatttgcagttaaaatgatcacrttagccatgatgtagataaagcaaggaaaaagaaggaaagaataagactgcaggcagaaaaacaactagcacagcagttatgatattctagacaaatgat

SEQ ID NO: 23257 - DNA, 201 bp, Homo sapiens
taattagttgcatagccttttattaattccctcaaaatttataatgttttaaattaacaacatagataagcatactgcattttttgggaaaacatgaaatrttaattatgtagcagtgacataagtttcgtaaactctgttgaatgttagaagatgcttacaacaatgttttccaaatatagggatttattataaacttat

SEQ ID NO: 23258 - DNA, 201 bp, Homo sapiens
caagcatgtttcttctatctattaggaaagggttatgaattgagcatttcagaggctatggtaagaagcagggagagaagggggcaagtagagaattgctraatatcaattctttttaaatattgagatttagaaataaaaatcaagaatctgtattttgacttgacttttcaatctattattctaacctcgtagctcatt

SEQ ID NO: 23259 - DNA, 201 bp, Homo sapiens
aggccttgataaggtagcataacagaacaggaagaattaaaactcatatttaaataattattttgttattacagcacttaaatctgtctagtagcaatacygaatctaataattgtaactttttctgagatggaaaattttatctcttgtccagtgttctgagatatttttagctcatttgtccctccacccccaactagc

SEQ ID NO: 23260 - DNA, 201 bp, Homo sapiens
gatttaatatatacaggaatgttctgggcctctgtaagagctgatccctctatcaggtttctgtgcagacaagcatgtttcttctatctattaggaaaggkttatgaattgagcatttcagaggctatggtaagaagcagggagagaagggggcaagtagagaattgctaaatatcaattctttttaaatattgagattta

SEQ ID NO: 23261 - DNA, 201 bp, Homo sapiens
tacgtatatttatgcatttctctggtagaagcttgtttggattttggcaatttttctgatatgaagtgttcttgattatcctagtataaaagatagggaamtctggcagaatcctttgctttgctaaagtagtgattttcactgaatctgaatcagtaaaaatcttgcctgtcagtaagaatatgcagactagagatatgg

SEQ ID NO: 23262 - DNA, 201 bp, Homo sapiens
ttccaaaaaagttttatgtatgggttaggtaaatgtttctggttttatctcattaaatgattggcttttagtatcagcatgaatcaagtataatttgactyacctcatccttaaattcttacttaatttggtaattattgtgtattttatcattttctactagtgtcttagcctgttgatcaaagcttgctgcagttagtt

SEQ ID NO: 23263 - DNA, 201 bp, Homo sapiens
tgtgtgtgcttacttgcgtgcgtgtgtgtgtgtgtgtgtgtgtatcactactactaatactaacataaatatatatatcattactacccacttagctataytctaaagttaaaagatctcaaaatacttcttgtgaaaaggtttactaagcccaaagttctaagagaaaaattatgaaaattggtttcctttgtttaacag

SEQ ID NO: 23264 - DNA, 201 bp, Homo sapiens
taaggttacacctactgtaccaataatgattttgtttttaaaaatacaaataaaaatctcccttccttggctttttggaaacagtttctttcccccgtaarttatattgcccatggtttcataaatacacatctcaaatgggttacttatgtaaagggtgtgtgtgcttacttgcgtgcgtgtgtgtgtgtgtgtgtgtgt

SEQ ID NO: 23265 - DNA, 201 bp, Homo sapiens
gagatctgaaggaaacaatatcttaagcataccctctaatccattcccagtacaaccactgggaaagtctgccctacatgtgaccacagtaaaccttttcrcctcccaggaatggtttgtgcactgcttttcttctttgcttataatattcattctgccttttcacagtttctcaatctggtaaatttcccctccttgtca

SEQ ID NO: 23266 - DNA, 201 bp, Homo sapiens
tcttgattatcctagtataaaagatagggaaatctggcagaatcctttgctttgctaaagtagtgattttcactgaatctgaatcagtaaaaatcttgccygtcagtaagaatatgcagactagagatatggcttgtttttgggtagcctccttgacagattttctttctttttgagacggagtcttacgctttttgccca

SEQ ID NO: 23267 - DNA, 201 bp, Homo sapiens
gaccaaactccttggcattacataccatatgtaatgtaattatacctgtggattttttttctcaatctaccttcatgtccccatgtttctaagcatcctcwaccagtgcttcccaaaatttttcatgacatgtcacacatggaataataaccagatgataccactgtctgactgcctgaagtctctggcttctctgagctt

SEQ ID NO: 23268 - DNA, 201 bp, Homo sapiens
aaatgaggtaagcactcagtgaggaaataatgggtattggttcacactcattgagtacttggattatgtcaaccactgtttgaagcaccttgtatgtactracacatttcttcctcacagcagctctctgaggttctctttattttgtagttgaggaaacttatgtcagattaaggaaatttcccaagatcacacaggtaa

SEQ ID NO: 23269 - DNA, 201 bp, Homo sapiens
ttgcacagtgctacaggtttttgcagaactgagcaagcccaacattagacagatagcctaaagactgattgatttatttgttttaatacaaatatacgctmacatgttgacatacagaaatctgtttcaaatgaattattttttaaagaacaaagaactttataaccctagtacctaatcctatgcctgacacatagtaga

SEQ ID NO: 23270 - DNA, 201 bp, Homo sapiens
tttttattctctgtagtatctttttgaggaacagaaagtttataattatatatttattataatatatattgatataaaggatccagttcatcagtcttttycttcgtggctggtgatttttgtagctagcttaagaaatcttggtcaaatctactgttaggtatattttctcttaccttcttgatgcttttattgtttttc

SEQ ID NO: 23271 - DNA, 201 bp, Homo sapiens
tatggagagggggagtatttttagaaagaatctctttttatgtgtttgttcctgtccaaacttattttctctcaggtggttgtactcattactacttcttygtcaaagaaaactgactctttctcaagtatataggtttcttaatcttagtaatttattttgaaagaagttcacgtcggatttttcaggtcaactaaagaa

SEQ ID NO: 23272 - DNA, 201 bp, Homo sapiens
tttacaagaggaagaatttggattagtgctggatacatactgttttgacttgtaaaatgactctttaatagaaatggacaaagaaaatatgctaataaaayaacttaagtatgtgtatgtgtgtgcatgctaaatttttttttcttctgttctcttcattttgtgctcatcatcaattgctgctatttactgtggtgcatt

SEQ ID NO: 23273 - DNA, 201 bp, Homo sapiens
actcattactacttctttgtcaaagaaaactgactctttctcaagtatataggtttcttaatcttagtaatttattttgaaagaagttcacgtcggatttktcaggtcaactaaagaaaaggaaaggcaaaacagaatctaaaacatttagatgtattgttgacatttttaatgagtgagcatttacaggtgtgtatgcaa

SEQ ID NO: 23274 - DNA, 201 bp, Homo sapiens
atgtcttttgcactctattctgtttccattcttttttttttttttttgtcactttgtgtattcatttggatgctttctagtaaccagtcttccattttaaraatcctctgttctgttttcactaatctcccattaagactatcttttgagttcttaatttttattatagtttttaggtttaggatttccctttgatggttt

SEQ ID NO: 23275 - DNA, 201 bp, Homo sapiens
tctagtaaccagtcttccattttaagaatcctctgttctgttttcactaatctcccattaagactatcttttgagttcttaatttttattatagtttttargtttaggatttccctttgatggttttctaatggattccaagtccctggtgaaattcaactttttaaaaattttgctgtagttcatgtggatttttgtttt

SEQ ID NO: 23276 - DNA, 201 bp, Homo sapiens
ttttatttttttaatccatctgctgttgtcattgtttaaattcaagtacttaatacatttatatttagggtaatatcttaaaatacttaggtttaatgtasttccttatttgccccacttgtatgttttttttcctgttttttttttcattcttttggaataggcaagtatttttattatttcatcctcttcccattgtct

SEQ ID NO: 23277 - DNA, 201 bp, Homo sapiens
ttgcttgagcctgggaggtggagattgcagtgagctgggatcgcgccactgcactccagcctgggtgacagagtgagactgtgtctcaaagaaaaaaaaaagttaccaataagatattttgcatcctttttttcaagctaagtcttcaaaatcaatgtgtatgttacacttgtagcacatcacagtttggactagccccat

SEQ ID NO: 23278 - DNA, 201 bp, Homo sapiens
atccttttgtaagttcttttgtctaaagtttgttaagaggaaagccaaagattattttgttgtatactaaaagctgtaaatattattaatttatgtcctakacttccctatggaaaagggaaactcagtattaccatgaacaggatccattctttatatgagtagttagaagctaattgtaggttattgagatttaattta

SEQ ID NO: 23279 - DNA, 201 bp, Homo sapiens
cttttcgttttcttaaaggtaccttttgaagagaaattttgttttgatttttgtaaagaccagtttgtccatgtttttcttttatacttctagaagttttrtagttttagctcataaatttcaagtttatttttcagtatggtgtgaggtaagggtcaatgttcatttttttcatatggatttctagtattcacagtacca

SEQ ID NO: 23280 - DNA, 201 bp, Homo sapiens
ctgataactaatgatgttaagtatcttttcacatacttacctcacaaaggaagctgtgtggttagcaagtatgttcaaatttttagtccagttactttggrttattttcttattattgaattatgaggattctttatatattttggatacaagccctttgcaaatatgcatattgtgaatattttatcccagtctgtgacc

SEQ ID NO: 23281 - DNA, 201 bp, Homo sapiens
atctttatttcctaagtcctgtatttgttttaggtagaaagaagtgatttccatgattgaaatggagttttgaattctttgataaaatacattttaaggtrtacagaattgtctgcaaagaattaaaacactcatttttaagcaagggaaatatatttattttatgattttcctaattgaatttttgccagctaatttgta

SEQ ID NO: 23282 - DNA, 201 bp, Homo sapiens
gctacagctaaaaaaaataaataaataagcacacacagatgtatgctgagtgttccagtgacttagctgacatgtatgctgtatatcctttgctgtgttcyttcaactattagaaaggaaattttaaaatagcctagaatttattattccaatagggtgaaaaggacaacttcaactttaaaaaaataaccaagctctcca

SEQ ID NO: 23283 - DNA, 201 bp, Homo sapiens
atgcacataggcacctgtaattaaagagccgccttcattttcacacatgaggaaactgaggctgttacagatgtagagacttgcccaaggtcttgaataasttctcagaaagggagtttgttctatgatttgtgttttttaataaagttttaatggacagaccacgatatccaacatggccttggagccatagggttcaga

SEQ ID NO: 23284 - DNA, 201 bp, Homo sapiens
catttaaaaggtcatccaatacgataatttttagtctggagcacacaagcagagttcaggtgaactccctggaattatttgcaaaattgggagtatttttygtatgtatagtttgaggggaatttctgtcaaatgcacataggcacctgtaattaaagagccgccttcattttcacacatgaggaaactgaggctgttaca

SEQ ID NO: 23285 - DNA, 201 bp, Homo sapiens
acagtaatgactatgcagtgtaagctgtggatattttgttatataagaatggcagggggtcctagaactgggggctggaaggcccatttaaaaggtcatcyaatacgataatttttagtctggagcacacaagcagagttcaggtgaactccctggaattatttgcaaaattgggagtattttttgtatgtatagtttgag

SEQ ID NO: 23286 - DNA, 201 bp, Homo sapiens
tcaaaatgcaaaattggtttgcctttagtttaaagtgatcagaacaaaaaaaaattaagataatttaatggcttatctttttcagtagtcctccagaatayaaactttataatcatctctcagacatttaaataaagtatctagtatttattaaatatttaccacatgccaggcaaagtacaattaatttaacatatgctc

SEQ ID NO: 23287 - DNA, 201 bp, Homo sapiens
ttctcacagggtgagaaatgctatacttgaacttggacttttttctttgatgtgcaattaaatgattagaaaataggaagttaaggtatttgcagttaaartgatcacgttagccatgatgtagataaagcaaggaaaaagaaggaaagaataagactgcaggcagaaaaacaactagcacagcagttatgatattctaga

SEQ ID NO: 23288 - DNA, 201 bp, Homo sapiens
atagaagtttcaataaaagagaagacttttaagctgagacttgaacaagaagtggagcttccctgatagacaaagagataaaatgtcattctgagcagagkgagaaatatgtgcgaaaacagggaggcagaaagcagcgtggtgagttttactaactgggtgtttaggtgctcctaagcaagtccaagttcaagtatagca

SEQ ID NO: 23289 - DNA, 201 bp, Homo sapiens
ggacaggccatttgtccccactgccactactcccttacccccattaagaacccatgggtttatatatttttaaatatcttaaaatatgtaaatatctaagkaagttcttcactcctattctatcttatggagaccctttttaaagagtgaattttatagagacataggaaatgttagtttgcattgttttcactttgcccc

SEQ ID NO: 23290 - DNA, 201 bp, Homo sapiens
agccatagaaagagttatcatttttttggctttcaggtactaaaatcaaaatgcaaaattggtttgcctttagtttaaagtgatcagaacaaaaaaaaatkaagataatttaatggcttatctttttcagtagtcctccagaatataaactttataatcatctctcagacatttaaataaagtatctagtatttattaaat

SEQ ID NO: 23291 - DNA, 201 bp, Homo sapiens
aaaactcagtaagtaatagagccagaattttgaactatgaataggtaagattaaaaaaaaagacattattttgtaatgtcttgtattatcagacaaggtaycagagacaaggaaaaagaaaggtgcactgaacagccaaagcaggactgacggaactcagaaatgggctgggaccagcctgggagaaagaaaacgcaaggc

SEQ ID NO: 23292 - DNA, 201 bp, Homo sapiens
tttaaaaaaatggtcatcaaaattttcttgactattgttggcactttgcattcccatagaagttttaaaatcaatgtgtcgggttcttccttctccccacmcagtaaactggcttgcattttgattggaattattaagtctttcaatcaatttggagagatttgggaagttaataccttgtaatccatgaacttcttagat

SEQ ID NO: 23293 - DNA, 201 bp, Homo sapiens
gttatccttctcatgtcccttgtatcatttttgtcattcatttcacttgtccgtaaactataggtatcaaatacattgttgttattttgaacaagcttttsttagatcagttaaaagtaggaaaaattaaagtttttatcttctttatttcttctttctctttctttatatagatcaaaatttctgacctatattttcttc

SEQ ID NO: 23294 - DNA, 201 bp, Homo sapiens
tttagaattttgtatattcttggtgaattgacccttttattaccccgagtgtctggtgatgcctcttacttaatgcctatttgatagtagatataggtgcrctgttatccttccatgtatatttcattctgtgtatatttgcatagtattccttttattcttttactttcaacctttgtatattcttatatttcagataca

SEQ ID NO: 23295 - DNA, 201 bp, Homo sapiens
tttttttttttttttatttgagacggagtctcactctgtcgcccaggctggagtgcagtggcgcgatctcggctcactgcaaactccgcctcccaggttcrcgccattcttctgcctcagcctcccaagtaggtgggactacaggcacccgccaccgcgcctggctaattttttgtatttttagtagagacggggtttcac

SEQ ID NO: 23296 - DNA, 201 bp, Homo sapiens
ttcttcaaatattggttctcttctttcttcttttggtgttgctattacacatgctacacctatttgcttcatagttcttagatattttgttctgtgtggttttattattttttttttaaatctagtccagtattttgttttcataaagttttccttatccttgcttttcagttttggaagtttgtatatacatatccgtaa

SEQ ID NO: 23297 - DNA, 201 bp, Homo sapiens
ggtctaagatatgatctatccttcagaatgtgtcatgtgcacttgaaaagaatatgtatttgagagccccatagatggttcacatcacaggactctgtacrgacaacccccagtaccaacccagagctgggtagacttgctgggtggctagacctagaagacagacaacaatcactgcagttaggctcacaggaagacaca

SEQ ID NO: 23298 - DNA, 201 bp, Homo sapiens
tcttcaaatattggttctcttctttcttcttttggtgttgctattacacatgctacacctatttgcttcatagttcttagatattttgttctgtgtggttttattattttttttttaaatctagtccagtattttgttttcataaagttttccttatccttgcttttcagttttggaagtttgtatatacatatccgtaag

SEQ ID NO: 23299 - DNA, 201 bp, Homo sapiens
ttcaaatattggttctcttctttcttcttttggtgttgctattacacatgctacacctatttgcttcatagttcttagatattttgttctgtgtggttttattattttttttttaaatctagtccagtattttgttttcataaagttttccttatccttgcttttcagttttggaagtttgtatatacatatccgtaagtg

SEQ ID NO: 23300 - DNA, 201 bp, Homo sapiens
gaacacatatagaatactttcacttcagctttaacaatgcatatagaatactttaaattaaaatctttaaattagagtctcttatgggtagcataattttkaatcttgttgtttaatccattcagccactctgtcttttgactggagaatttaatgttccatttgaagtaattattgataggtaagggcttactagagcta

SEQ ID NO: 23301 - DNA, 201 bp, Homo sapiens
tgtgggatcattcttgatctttagaaaaagatgtaatatttattaaaaagtttatttttcatgagcccatgtagtatttaaattttttaaaaaatgcaatktatcttattgcaattggtatcagattgtaactctttttgggtaaagactgtattttgcatatcttaagtgcttgactgtgcttagcattctaccttataa

SEQ ID NO: 23302 - DNA, 201 bp, Homo sapiens
ctatgggtgtacagtttgaatttttgttgttgttgttttattttgttttggggtgtttggctaggaagaactaactataggatgtttgtcagggacatgtkccttgggaaatttatctcactgctctgtgcttgtttgacagctgttcttgcacttctgactttaattcaaaaagttataaagccatatgtgagcagctgt

SEQ ID NO: 23303 - DNA, 201 bp, Homo sapiens
catagaagtttcaataaaagagaagacttttaagctgagacttgaacaagaagtggagcttccctgatagacaaagagataaaatgtcattctgagcagakggagaaatatgtgcgaaaacagggaggcagaaagcagcgtggtgagttttactaactgggtgtttaggtgctcctaagcaagtccaagttcaagtatagc

SEQ ID NO: 23304 - DNA, 201 bp, Homo sapiens
agacagcagctaaagtcaaagatacagcaacattttcaaaagttagctttgtacatctcttggctgagtaatgtgaacccacacatggaaagatttaatakatacaggaatgttctgggcctctgtaagagctgatccctctatcaggtttctgtgcagacaagcatgtttcttctatctattaggaaagggttatgaatt

SEQ ID NO: 23305 - DNA, 201 bp, Homo sapiens
caatggagtggcattgtcaaaaggggaaagtgtctaataataagttgaaaacattgtgcagttatacttcaaagacatctcttaaattgtcctgttcaggwtcactgcctctgctattattcatgttctaatttagggcctcgaaattgtattagttgcctaactggaagttgcacttcgttcctgtgcttcttccacact

SEQ ID NO: 23306 - DNA, 201 bp, Homo sapiens
tttcttgcacagtgctacaggtttttgcagaactgagcaagcccaacattagacagatagcctaaagactgattgatttatttgttttaatacaaatataygctcacatgttgacatacagaaatctgtttcaaatgaattattttttaaagaacaaagaactttataaccctagtacctaatcctatgcctgacacatag

SEQ ID NO: 23307 - DNA, 201 bp, Homo sapiens
gatgacctctgcaagtgcaggcaggcagtatccacagctctgcatcaccactcggcgtcaccactgtgcaacccatcagtcctgtggtgcccgttcaagtyacattgtataaatctgtcctacggcatctgtatcctcaccatctaataactttagcacagaatattgtttaagaatgatggagagggaaaagaagacttt

SEQ ID NO: 23308 - DNA, 201 bp, Homo sapiens
aatattggttctcttctttcttcttttggtgttgctattacacatgctacacctatttgcttcatagttcttagatattttgttctgtgtggttttattattttttttttaaatctagtccagtattttgttttcataaagttttccttatccttgcttttcagttttggaagtttgtatatacatatccgtaagtgcaga

SEQ ID NO: 23309 - DNA, 201 bp, Homo sapiens
tttttttgtaaggatataatgccaaaaattttgaaaaaaagaaaacaggcactgtggctcacacctgtaatccctgcactttgggaggctgaggtgggagratctcttgaaccaaggagttcaagaccagcctgggcaacatggcaaaaccccatctgtccaaaaaatacaaaaattagctgggtatagtggcacatgctt

SEQ ID NO: 23310 - DNA, 201 bp, Homo sapiens
ggttcaggtgatcatcccacctcagcttcccaagtagctggaaccacaggcgtgcaccacacctggctaatttattttttttaagagacagggtctccctrtgttgcccaggctggtcttgaacttctggaatcaattgatcctcccactgcagcctcccaaagtgctgggattacaggtgtgagacaccacgcccagctt

SEQ ID NO: 23311 - DNA, 201 bp, Homo sapiens
tgaggcaggagaatcgcttgagcccgggaggtgcaggttgcagtgagccaagattgtgccactgcactccagcctaaacgacagagctacactccgtctcaaaaaaaaaaaaagagcaaccagctggagtcaccgagcatgtagctgcccagagcctcctccctacatcatgtgtgtagcttgttccatattgtgaagggt

SEQ ID NO: 23312 - DNA, 201 bp, Homo sapiens
cctgagtagctgggactacaggcacgtgccaccacacctggctaatttttgtatttttagtagagacggggtttcgccatgttggccaggctggtctccarctcctgacctcgtggtctgcccgcctcaggctcccaaagtgctgggattacaggcatgagccaccacacccggccgatatactcagagttctaatgtttt

SEQ ID NO: 23313 - DNA, 201 bp, Homo sapiens
ataattttatggccagcagatgacttttttctttcctcttattttgtaacttttaattttgacatatgatacgtacacataaagttgaaaaaaatagtacrtagtaccccataagccatagcccagcacccccaatggtgatatcttatatctgtagaacaatatcaaaaccaggaaattgtcattagtacaatattatta

SEQ ID NO: 23314 - DNA, 201 bp, Homo sapiens
atctcagctcactgcaacctccgctcccaggttcaagtgattctcctgccccagcctcctgagtagctgggattacaggtgcgctccaccacgcccagctratttttgtatttatttatttatttgagacggaatcttgctctgtcacccaggctagagtccaatggcgcagtcttggctcactgcaacctccgcctcctg

SEQ ID NO: 23315 - DNA, 201 bp, Homo sapiens
tgggattacaggcacccaccaccgtgttggccaggctggtcttgaactcctgacctcaggtgatgcacctgcctcggcctcctaaagtgctgggattatargcgtgagccactgcgcccagccagttgtaccttttttattcctgagtagttacactgctttatggatgtaccagagtttaaccatttatctgtctaagga

SEQ ID NO: 23316 - DNA, 201 bp, Homo sapiens
tgatgtcctccagggtcatccatgttgtcaaaacataacagactttccttctttttttaggctgaatagtattccattttgttgcacattttctttatccrttcatttgttgatggacgcttaggttgatttcatatcttggctattgtgaatagtgctacaataaacatgggagtacagatagctctttgatatactgat

SEQ ID NO: 23317 - DNA, 201 bp, Homo sapiens
gagaggaggcaagcgtctgacacaggtagaaagagaaagccagaagtctcagcaaactgcttataccccttctcctgcctgttttgttgtagctgctggcrgccattggatggcacctgcattgaagggtattgctttcagtccatcaactcaaatgtcagtctcctctgacaacaccctcacagacacacccagtaacaa

SEQ ID NO: 23318 - DNA, 201 bp, Homo sapiens
ttatttaataatatcatataatgtttttcatttgaaaaggaaaaagatgttatcaagttcctgcctatttaactttagagagaacttagtttggtttattmagttagacatgtagtcagtgtagcactttaatcttttaactttaccactttaattattttacaaatacaagttcttgatgatcttttatgtttttctagg

SEQ ID NO: 23319 - DNA, 201 bp, Homo sapiens
aagtcttaccttttatatttaggtccttatctgaagttttcgacctgacattcagtgtacagtgaacacactcatacatctcctcatgcagatatgcaccrtctaaagatggaggctactagctacatttaactgtttaattttcaactgattataattaaatagaatttaaaattcagttccttagtttcacagtagcca

SEQ ID NO: 23320 - DNA, 201 bp, Homo sapiens
cctaatctctactgtttttatttggctactagctatttagtgtaaccccatttttgtggaaggctggccaagagcacacttcaactcaatagtagtcaaakccagctctactgaacctacatgaacacatgagcacacaaattgtgtggttctgaagtttgtgggggtattttttagttcttgataaatgttcatctgcct

SEQ ID NO: 23321 - DNA, 201 bp, Homo sapiens
ttagggatatgatttccctcttgttctgctgtctctctgtccctcagtgattacaggtagagcatcacttcaataactcttccagtcagtattggtggtgwcagccagtctgacctgaaaagaaaccaataccccttcccaacctggaaatgctggtaatttatttcaccatccccagcttccctatatttttccccatcc

SEQ ID NO: 23322 - DNA, 201 bp, Homo sapiens
aagaaaaccttgaccctgtttcttcaaatgaatataagctctaataaatagacatttgttcaatctctgaactatttaactgtaatgagttgaaaaaaaatttttttttttttgagacagagtttcgctcttgttgcccaggctggagtgcagtggtgagatcttggctcactgcaacctccgcctttctgtttcaagcga

SEQ ID NO: 23323 - DNA, 201 bp, Homo sapiens
ggagaccgaggtgagcagatcacctgaagtcaggagttcgagaccagcctggccaacatggtgaaaccccgtctctactaaaaatacaaaaaaattagacrggcatagtggcacgtgcttgtaatcccagctactcaggaggctgaggcaggagaatcatttgaacccgggaggcggaggttgcagtgagccaaaattgcg

SEQ ID NO: 23324 - DNA, 201 bp, Homo sapiens
tgtaatcccagctactcaggaggctgaggcaggagaatcatttgaacccgggaggcggaggttgcagtgagccaaaattgcgccactgcattccagcctgrgcaacaagaacaaaaactccatctcaaaaaaaaaaagtaaaattatatttgtagctcatactatatttcttttgaacaacactgatctaaagtgctatgt

SEQ ID NO: 23325 - DNA, 201 bp, Homo sapiens
tttgtttagtttttactaaattggctctacaaatcttttttctctagcttacttgtcttctgtaccacctagcttagttcttgatgttctctaatagttcrtgtgttccaggtttttcctgtctttctaataacatgtaagtatcttgaggtcagagagattgatacagtttggctgtgtccccaccaaaatctcatctca

SEQ ID NO: 23326 - DNA, 201 bp, Homo sapiens
tttaatttaggtatatctcctaatgctatccctccaccctccccccatcccacaacaggccccggtgtgtgatgttccccttcctgtgtccatgtgttctyattgttcatttcccacctgtgagtgagaacatgcggtgtttggttttttgtccttgcgatagtttgctgagaatgatggtttccagcttcatccatgtcc

SEQ ID NO: 23327 - DNA, 201 bp, Homo sapiens
gtgaatatgtgccacattttcttaatccagtctatcattgttggacctttgggttggttccaggtctttgctattgtgaatagtgccgcaataaacatacstgtgcatgtgtctttatagcagcatgatttataatcatttgggtatatacccagtaatgggatggctgggtcaaatggtatttctagttctagatccctg

SEQ ID NO: 23328 - DNA, 201 bp, Homo sapiens
atgtgccacattttcttaatccagtctatcattgttggacctttgggttggttccaggtctttgctattgtgaatagtgccgcaataaacatacgtgtgcmtgtgtctttatagcagcatgatttataatcatttgggtatatacccagtaatgggatggctgggtcaaatggtatttctagttctagatccctgaggaat

SEQ ID NO: 23329 - DNA, 201 bp, Homo sapiens
gtgtctttatagcagcatgatttataatcatttgggtatatacccagtaatgggatggctgggtcaaatggtatttctagttctagatccctgaggaatcrccacactgacttccacaatggttgaactagtttacagtcccaccaacagtgtaaaagtgctcctatttctccacatcctctccagcacctgttgtttcct

SEQ ID NO: 23330 - DNA, 201 bp, Homo sapiens
atgagtagattgcaaaaattttctcccattctgtaggttgcctgttcacgctgatggtagtttcttttgctgtgcagaagttctttagtttattagatccyatttgtcaattttggcttttgttgccattgcttttggtgttttagacatgaagttcttgcacatgcctatgtcctgaatggtgttgcctaggttttcctc

SEQ ID NO: 23331 - DNA, 201 bp, Homo sapiens
gtagttttttccaattctgtgaagaaagtcattggtagtttgatggggatggcattgaatctgtaaattaccttgggcagtgtggccattttcacgatatygattcttcctacccatgagcatggaatgttcttccatttgttcgtatcctcttttatttcattgagcagtggtttgtagttctccttgaagaggtccttc

SEQ ID NO: 23332 - DNA, 201 bp, Homo sapiens
tgattcttcctacccatgagcatggaatgttcttccatttgttcgtatcctcttttatttcattgagcagtggtttgtagttctccttgaagaggtccttyacatcctttgtaagttggattcctaggtattttattctctttgaagaaattgtgaatgggagttcactcatgatttggttctctgtttgtctgttattgg

SEQ ID NO: 23333 - DNA, 201 bp, Homo sapiens
gttacaaacattcacatttcaggtggtcactacttctctgaccataactgatcactaaagccgctttgtcattaccatgtaagccaccacaaaacaacaayttatagctcatagaaaaatctatagaagcaggctgggctcgggggctcacacctgtaatcccaggactttgagaggccaaggcgggcggatcacaaggtc

SEQ ID NO: 23334 - DNA, 201 bp, Homo sapiens
gtttgaagtcaggtagcatgatgcctccagctttgttcttttggcttaggattgacttggtgatgcgggctcttttttggttccatatgaactttaaagtmgttttttccaattctgtgaagaaagtcattggtagcttgatggggatggcattgaatctataaattaccttgggcagtgtggccattttcacgatattga

SEQ ID NO: 23335 - DNA, 201 bp, Homo sapiens
attttagatcttctctaatatatactctcaatactataagttttgctttaagtactgctttctctgcattgacaaattttgataagttctattttctttgyatatttatagacaatagaactttgataagttctatttatatatttatagatatatatctataaaactagtgtatatatgtaaatagtatatatatatgtg

SEQ ID NO: 23336 - DNA, 201 bp, Homo sapiens
cacctgagctccacctcctgtcagatcagcggtggcattagattctcataggtgtgggaaccctattgtgaactgtgcatgtgagggatccaggttgtgcrctccttatgagagtctaatgcctgatgatctgagatggaacggattcatcctgaaaccacccgcactcctccgccccctgtccatggaaagattgtcttc

SEQ ID NO: 23337 - DNA, 201 bp, Homo sapiens
tgtgtgtgtgtgtgtgtgtgtgtgtatatatatataaagagagagagacagagacagagacagggtcttgctctgctgtccacacctcagtgcagtggtgygatcacagctcactaaggcctcaacctccctggctcgagtgatcctcctgtctcagcctcccaactagctacaactacagacatgcatcaccaagcttga

SEQ ID NO: 23338 - DNA, 201 bp, Homo sapiens
actggtccgtagcatgtcaggaaccaggccacacggtaggaggtgagcagtgggcaagtgagcattaccacctgagctccacctcctgtcagatcagcggyggcattagattctcataggtgtgggaaccctattgtgaactgtgcatgtgagggatccaggttgtgcgctccttatgagagtctaatgcctgatgatctg

SEQ ID NO: 23339 - DNA, 201 bp, Homo sapiens
ttgggatctgctgtgtgaaggagactggccccgacttatttgctcatatcagcatgcatcactcagctggtcattgcaaaagtgcttgactgtaacagggsggtctggtactgagactgggctcccttggaatctgctgtgggatggaggttggtgttcttgtcacattggctcagatgggcatgtgtctcccagcaggtc

SEQ ID NO: 23340 - DNA, 201 bp, Homo sapiens
gttttatattctgcttttttcacttaaaattatgtagtaaacattttacattagaatttgttggcaaaactttttaaatgactacaccaaagacttttatrtggataaactgtaattggttgatccttctttagtctcaaatatttaggcttttgtctatttttccataccattgttataaagatatttgtgtgtaaatct

SEQ ID NO: 23341 - DNA, 201 bp, Homo sapiens
aggaatagaaggaaactttacaaactagttatatacaaaagcctacaacaaatatcaataccaaagctttaatcaaactttatacaaagcaagacaaatayatattcttgatatagatctgactagtccaataagaaaaaaaaagtgaaataaaggtggacagagaaatggtggagcagaaaagagaaactaaaatagata

SEQ ID NO: 23342 - DNA, 201 bp, Homo sapiens
tggcttctttcatgtagtagtatgcatttaatattcctccatgccttctcataacttgatagcttatttccttttagcacagaataatattccattgtctrgacctacctcagtttacccattaacctactgaaggacatcttggttgcttccaagttatgaagactgtgaataaagcttctgggaacatctgtgtgcaag

SEQ ID NO: 23343 - DNA, 201 bp, Homo sapiens
attcagtatgatattggctgtgggtttgtcatagatagctcttactattttgagatacgtcccatcaatacctaatttattgagagtttttagcatgaagsgttgttgaattttgtcaaaggccttttctgcatctattgagataatcgtggtttttgtctttggttctgtttatatgctggattacatttactgatttgt

SEQ ID NO: 23344 - DNA, 201 bp, Homo sapiens
agtaaaattaaatagaatataaattagtattaatagttttgctccaaaatctcaggcagtaaagaggattatctatgatgtcatttcaaacaaatatatayacacacacacacacacacatcagaactgttcataagtatgtttttttcctctacaaatgtatagcggtcctttaatatgttctacaagtggttcatgttg

SEQ ID NO: 23345 - DNA, 201 bp, Homo sapiens
ggtttgccagtattttattgaagatttttgcatcgatgttcatcagggatattagtctaaaattctctttttttgttgtgtctctgccagtctttggtatyaggatgatgctggcctcataaaatgagttaggaaggattccctctcttcctgttgattggaatagtttcagaaggaatggtaccagctcctccttgtacc

SEQ ID NO: 23346 - DNA, 201 bp, Homo sapiens
tatgaccattacagctttgagaagataaaatgacttgttccaaattacttttggcagagaaaataacctgaatctcaggtcaagttgtgctctatttcttytgtacatttaaaagtgtggggatcctcttggaattagcctgtgaaatgtatttgcattgaaaggtcaatctcaggaatttcagagcaaaggttttgtttg

SEQ ID NO: 23347 - DNA, 201 bp, Homo sapiens
atccatctggtcctggactttttttcgttggtaagctattaattattgcctcaatttcagagcctgttattggtctattcagagattcaacttcttcctgktttagtcttgggagggtgtatgtgtcgaggaatgtacccatttcttctagattttccagtttatttgcatagaggtgtttataatattctctgatggtag

SEQ ID NO: 23348 - DNA, 201 bp, Homo sapiens
gagagctttacttccaactatgtggtcaattttggaataggtatggtgtggtgctgaaaagaatgtatattcggttgatttgaggtggagagttctgtagwtgtctattaggtccacttggttaagagctgagttcaattcctgggtatccttgttaactttctgtctcgttgatctgtctaatgttgacagtggggtgtt

SEQ ID NO: 23349 - DNA, 201 bp, Homo sapiens
tgcaacccctgcctttttttgttttccatttgcttggtagatcttcctccatctctttgttttgagcctatgtgtgtctctgtacatgagattttgagatkagtttcctgaatacagcacactgatgggtcttgactctttatccagtttgccagtccgtgtattttaattggagcatttagcccatttacatttaaggtt

SEQ ID NO: 23350 - DNA, 201 bp, Homo sapiens
gattttgagatgagtttcctgaatacagcacactgatgggtcttgactctttatccagtttgccagtccgtgtattttaattggagcatttagcccatttmcatttaaggttaatattgttatgtgtgaatttgatcctgtcattatgatgttagctggttattttgctcgttagttgatgcagtttcttcctagccttga

SEQ ID NO: 23351 - DNA, 201 bp, Homo sapiens
cagactttcttgttactgtaacgtttatttcttcaaacagatcataaagcaagcagatattatccaggtgtgcaaaagtgattaaccatgtgattttcagaaaaaaaaaaaaaaaaagaaaaagcaatcaatcagcctttaaggctgttgttgtgtaataaaaaccttgcttgacagttgaagtacaccttaactttttca

SEQ ID NO: 23352 - DNA, 201 bp, Homo sapiens
cccggctaattttgtatttttagtagagacgtggtttctccatgttggtcaggctggtctcgaactcttgatctcaggtgatccgcttgccttggcctccyaaagtggtgggattacaggcatgagccaccacacctggccataaagttgaaaagtcttaagttgaatcctaagtcagggactgtctttatcactgaatat

SEQ ID NO: 23353 - DNA, 201 bp, Homo sapiens
tgtcattatgatgttagctggttattttgctcgttagttgatgcagtttcttcctagccttgatggtctttacaatttggcatgtttttgcagtggctggkaccggttgttcctttccatgtttagtcccagcaccatttattaaagaggaaaatcttaaaagcaactggagaaaaaaaaaagataagatacagattaata

SEQ ID NO: 23354 - DNA, 201 bp, Homo sapiens
acttataaatttgaaaaagcttcttgtcttctattgttaatgctcctagaatctcatgtttgagaacgaatgttcagtgtagccaaaacctaaatctgggrctatatgttgaatgttttaaagtcactagtagaagggcaatttggtggctaattttaaagtacataaagagtattaacaataatgaagtgtcattttgtt

SEQ ID NO: 23355 - DNA, 201 bp, Homo sapiens
tttccagaaagttttccgtttactttgcccatattcattagaggaatcactatctatgactgctgtagccctacaagatgtatttcttaataagacttggragtctaaattattctttaattcatgagttgcagaatggatgttgtgttaacaaggcttgaaaacaacactaatctacatctccatcagagttgttggctg

SEQ ID NO: 23356 - DNA, 201 bp, Homo sapiens
tggtttgatcttttatccagatcactcgaagtttctccatatcatcagtaagactgttttgctctcttagtattcatgtgttcactagagtagcacaattyccttgaagagtttttccttagcattcacaatttgcttactgattggcagaggaggcctagcttttggcctttctcagttttcaatgcacctgcttcacaa

SEQ ID NO: 23357 - DNA, 201 bp, Homo sapiens
gagtagctcctttctgtaggcaggtcatctcgttgagtgttgagctctcagcagagaggaggcctggagtgggtggctcctctctgcaggcaggttgtccygacgaatgttcagctcttagcagagagggtagctcctctctgctgctggtcatcctgttgtctgcagctctcagcagagaggaggccctgaagagggtag

SEQ ID NO: 23358 - DNA, 201 bp, Homo sapiens
tgatcttttatccagatcactcgaagtttctccatatcatcagtaagactgttttgctctcttagtattcatgtgttcactagagtagcacaatttccttsaagagtttttccttagcattcacaatttgcttactgattggcagaggaggcctagcttttggcctttctcagttttcaatgcacctgcttcacaaagctt

SEQ ID NO: 23359 - DNA, 201 bp, Homo sapiens
ttggggggagtatgggaaggagtgttccatggtcctgtgattaggtctgagtcttttagtgagtctatacccttggactgtgaacttcacaattttctccygttaggtgggacaggatggctagatggagctggagttttttattttcattctcccatgggaaaggctagagagggctgaagttgggtatttctcttcctc

SEQ ID NO: 23360 - DNA, 201 bp, Homo sapiens
aaattgtgaaagatatgtagaagtcttaaataattttggtttcaggattattttctattgttgtgttagactcatggaggtagtaaattggcattaatttyccttacagtttttctggaagaggaaatatgcttaatgagctaaataagacataacattttgttttcttacattgttgcaaattgaagttgggttttgttg

SEQ ID NO: 23361 - DNA, 201 bp, Homo sapiens
aattttgggggcagtgatttgccctgtgaccttactaatatgatgtatctaagaagagttggtttttcagtttgttcagctttttacttgctgttaggacrgagcgaagacttccgagctcttaacgttctggaccagaaattggaacaatgctgtccttttattgtctcttctctacactgcaggcagccatggtgtttc

SEQ ID NO: 23362 - DNA, 201 bp, Homo sapiens
acaattaaaggcctccgatgtaatttattggcagcctgaaatatttactatgcttgtagtaattatgaaagacctcctaaagcttttgccaactgtgtttmtacttgacagttaaactcccacgtggaaaagttatattatggagattcttttgaaggatgttgatagtgtttggctctgtgtccccacccaactctcatg

SEQ ID NO: 23363 - DNA, 201 bp, Homo sapiens
actatgcttgtagtaattatgaaagacctcctaaagcttttgccaactgtgtttctacttgacagttaaactcccacgtggaaaagttatattatggagawtcttttgaaggatgttgatagtgtttggctctgtgtccccacccaactctcatgtcaaattgtaatccccgtaggttggaggagactcctggtgggaggt

SEQ ID NO: 23364 - DNA, 201 bp, Homo sapiens
cagtgattcctaacccctttttggttttggatcctttttagactataatgaaagttttgaaccttctctatagaaaaatatataatatgtatacatgggtrtatgttttcataagtttcaatgtattcttagatccatctagatatccatagactctcagttaagaatctttactatgtggccaacaaacacacaaaatta

SEQ ID NO: 23365 - DNA, 201 bp, Homo sapiens
tgtaccggcagagtagctacctgcaagaattagtgcccaaaacagttctcattgactttgcaagtactctttggtcccatatattttaaatactggagaaraccatgttaaattaataaattagcgttgtgatttgtatgacaacctcatgtgcatttgattagtgtgagttagaggctattctcctgtggatacactaag

SEQ ID NO: 23366 - DNA, 201 bp, Homo sapiens
caagtactagttagactccagttgccatcaacacaagaactttgaagaagtactgtcctaattgttgtttttaaagtaattagaataaaaataatggattmttctatttttttaagaagttagtcaggctgtcacattaaattaagtagtataggtgcaaaaccagtctttttaaactattactaccactttttccctagg

SEQ ID NO: 23367 - DNA, 201 bp, Homo sapiens
cacattctttcagttttaaaagatgtgatttttaaaaaagacccctttgaatgtaactattatgtggcaagaaagccttgctttggttaggtattttgctrtgtgataaagatcctttggtaaaattcaggaaagctttggaccttaaaaaatcattcccttcctgatgcagtattttattagaagataggtgagttctga

SEQ ID NO: 23368 - DNA, 201 bp, Homo sapiens
aaagggtaacttctgggtcactgccatggaaacgggtggtaacttttgagtcattgccatgacatttgtcaactgccatggttctggtggcagtgtcttakgccaatgagcattgagcgcagctagagatcgcttttgttgccatctgctggctttggccagtttcttcactttgccccatgtggactagatcctgttttg

SEQ ID NO: 23369 - DNA, 201 bp, Homo sapiens
agcttttatttacatttttattgcttatgattcagtattaatgaaactatttcataactcttcaatatctactccccaatcttgtatcttacttttagcayatttctctagagaattgaagttttgaaattctttgtttcatctaatttattcttccagagttttcaacattttcatctatacgaaggtacattctagcta

SEQ ID NO: 23370 - DNA, 201 bp, Homo sapiens
agaggctggttcggaatttggggctgcaggtccaagcctggctcttgtgtaggcctagagcctaagtctgcagggatccatcctgggctgtgggggctgaycttgggctgggatagggcaagtactggaatctgtggggagagctggatgcttatgtcatccttcttccatgtggacagtatttctctccacattgtgctg

SEQ ID NO: 23371 - DNA, 201 bp, Homo sapiens
aaattccaattttcttatccagagataacagctgttaacattttgttatagttcctgtaagatttgtgtgtgtgtgtgtgtgtgtgtgtgtgtgtgtgtgtatgtgtgtgtgtgtgtatgtatattagagatggagtctcactctgtcgcctatgctggagtgcagcagcacgatctcagcttactgcagccttcacctac

SEQ ID NO: 23372 - DNA, 201 bp, Homo sapiens
gaaattccaattttcttatccagagataacagctgttaacattttgttatagttcctgtaagatttgtgtgtgtgtgtgtgtgtgtgtgtgtgtgtgtgtgtatgtgtgtgtgtgtgtatgtatattagagatggagtctcactctgtcgcctatgctggagtgcagcagcacgatctcagcttactgcagccttcaccta

SEQ ID NO: 23373 - DNA, 201 bp, Homo sapiens
tgaaattccaattttcttatccagagataacagctgttaacattttgttatagttcctgtaagatttgtgtgtgtgtgtgtgtgtgtgtgtgtgtgtgtgtgtatgtgtgtgtgtgtgtatgtatattagagatggagtctcactctgtcgcctatgctggagtgcagcagcacgatctcagcttactgcagccttcacct

SEQ ID NO: 23374 - DNA, 201 bp, Homo sapiens
gtgaaattccaattttcttatccagagataacagctgttaacattttgttatagttcctgtaagatttgtgtgtgtgtgtgtgtgtgtgtgtgtgtgtgtgtgtatgtgtgtgtgtgtgtatgtatattagagatggagtctcactctgtcgcctatgctggagtgcagcagcacgatctcagcttactgcagccttcacc

SEQ ID NO: 23375 - DNA, 201 bp, Homo sapiens
agttttcaatgcacctgcttcacaaagcttcatcacttctagctttttatgtaaagtgagagatgtgggactcttcctttcacttaaatacttaaaggccrttgtagggttattcattggcctaatttcattattattgtgactcagggcataggaaggcccaaggagaggaagaaaagcagggaacaaccagttggtgga

SEQ ID NO: 23376 - DNA, 201 bp, Homo sapiens
ttaagcaattagattactgcacacctaataatagtagcaaataatgcactttcaatctgctaatatgttaagcacttttcattatctcttccttttacatraggggaatctgaagtttagggaatttaaaacttccacaaagttagtagtcagtagtttatatactagtattaaatctgtttaaatccaaagccggtgaca

SEQ ID NO: 23377 - DNA, 201 bp, Homo sapiens
gctttttatgtaaagtgagagatgtgggactcttcctttcacttaaatacttaaaggccattgtagggttattcattggcctaatttcattattattgtgwctcagggcataggaaggcccaaggagaggaagaaaagcagggaacaaccagttggtggaacaatcagaatacacacaacatttgtcagttaagtttacca

SEQ ID NO: 23378 - DNA, 201 bp, Homo sapiens
tcttcctttcacttaaatacttaaaggccattgtagggttattcattggcctaatttcattattattgtgactcagggcataggaaggcccaaggagaggragaaaagcagggaacaaccagttggtggaacaatcagaatacacacaacatttgtcagttaagtttaccatcttatatgggcatggtttgtggtgaccca

SEQ ID NO: 23379 - DNA, 201 bp, Homo sapiens
agtgacgccacttgaggccaggagttcaagaccagcctggccaacatggtgaaactgtgtctctactaaaagtacaaaaattagccaggtgtggtggtgcmtgcctgtaatcacaactacttgggaggttgaggcatgagaatcgcttgaacctaggaggtggagtttgcagtgagctgagatcatgccactgcactccag

SEQ ID NO: 23380 - DNA, 201 bp, Homo sapiens
tggttactcaaggctctgatggaaatgcacaaggagaattaatgtttttgtgtctgctaaaacagtatctattctgcagcctatggatgaaggagtaataytgactttcaagtcttatgatataagaaatacgtttcttaaggctattgctgctgtaatagtagatatgggcaaagtaaacctccttgaaaggagtcacca

SEQ ID NO: 23381 - DNA, 201 bp, Homo sapiens
ctaaaagtacaaaaattagccaggtgtggtggtgcatgcctgtaatcacaactacttgggaggttgaggcatgagaatcgcttgaacctaggaggtggagkttgcagtgagctgagatcatgccactgcactccagcctgggcgacagagtgaaaccttgtctcaaaaaaaaaaaaaaaaaaaaaaaggagttccattcca

SEQ ID NO: 23382 - DNA, 201 bp, Homo sapiens
ggtagatacagcaaaagagctagaattagaagtggagtgtgaagttgggactgaattgctgcaatctcatgaacaaattagaatggatgaggagttatttsttatggctgagcaaataaagtgatttcttgagatggaatctactggtgaagatgctgtgaatattgttgaaatggtaactgaggatttagtatatcgtgt

SEQ ID NO: 23383 - DNA, 201 bp, Homo sapiens
cacggagagtgaactgaaatagggtggggcattgcctcacccaggaactggaaggggttgtgggatttccctctcctagccaagggaagccatgacagacrgtacctggaatatcgctacactcctgcccaaatactgcgcttttcccatggtcttagcaactggcagacaaggagattctctcccgtgcctggcttggca

SEQ ID NO: 23384 - DNA, 201 bp, Homo sapiens
agaggattgactccatctttaaaagaagttctactgtggtttaccctatcaaatagcattacatgctacaaagatatctttcatgaaaggaagagtcagtygatgtggcatactttattgttgtctttttttttagaaattgccacagccaccccagcctgcagcaactaccaccctgatcagttagctgtcatcaacatc

SEQ ID NO: 23385 - DNA, 201 bp, Homo sapiens
ttgtgggatttccctctcctagccaagggaagccatgacagacggtacctggaatatcgctacactcctgcccaaatactgcgcttttcccatggtcttarcaactggcagacaaggagattctctcccgtgcctggcttggcagatccaacacccacggagccttgcttgctgctagtgcagcagtttgagatcgacctg

SEQ ID NO: 23386 - DNA, 201 bp, Homo sapiens
gcatccgccattgctgaagcttaagtaggtaaacaaagtggccaggaagctcaaactgggtggagcccactgcagctcaggaaggcctactgcctccatgwactgtacctctgtagacagggcatagctgaacaaaaggcagcagtaacttctgcagacttaaacgtccctgtgtgacagctctgaagacagcagtggttc

SEQ ID NO: 23387 - DNA, 201 bp, Homo sapiens
ctcaagtgggtccctgacccccatgtagcctaactgggagacatctcccagtaggggctgacagacacctcatacaggcgggtttccctctgcgatgaagyttccagaggaaggatcaggcagtaatatttgctgctcggcagcctccgctggtgatacccaggcaaacagggtctggagtggacctccagcaaactccaa

SEQ ID NO: 23388 - DNA, 201 bp, Homo sapiens
cttcaaatattggttctcttctttcttcttttggtgttgctattacacatgctacacctatttgcttcatagttcttagatattttgttctgtgtggttttattattttttttttaaatctagtccagtattttgttttcataaagttttccttatccttgcttttcagttttggaagtttgtatatacatatccgtaagt

SEQ ID NO: 23389 - DNA, 201 bp, Homo sapiens
cagcatcacattatttatctgtgtgtttgtgaaataatagctttaagtcttctagaggtttgtaagttatggtgtcttcctcttatgcctgcagcgacttrcaagaaacaggtttaatcctggacagctgtatccagctagtgattctctaatgtttgacagcagtggaggtccttaacaatacctgataggggtccttcc

SEQ ID NO: 23390 - DNA, 201 bp, Homo sapiens
cccatctgtaggtcaccaacatcaaagaccaaaggtagataaaaccacaaagatggggagaaaccagaacagaaaagctgaaaattctaaaaaccagagckcctcttctcctccaaaggatcacagctccttgccagcaacagaacaaagctggatggagaatgactttgacgagctgacagaagtgggattcagaaggtc

SEQ ID NO: 23391 - DNA, 201 bp, Homo sapiens
aatcaagctatactgggggaaaagtgttcctgtagatctctaaggcaaaacactctagtatcaggccataacagcagtcagaaccagaggagaaacaagtyacaggagctgacaaaaaagctaaaggaaagagttacacaaatctgagaagctttcaaaagaaataaatcacagaattgaaaaagcaaaaattctggtaag

SEQ ID NO: 23392 - DNA, 201 bp, Homo sapiens
tgtagcacactaggctggtgaaataattgcttgtgatgtccctaaatccccgaggcttttttctacctcctgcttagatagtgaagagaagttgaagttgmgtcctctagtgttcattttgcgtaagagtgataggatgcggtaggacagatgaagattaatgagattgtgtgatatcaagtaggctcattgtctttagat

SEQ ID NO: 23393 - DNA, 201 bp, Homo sapiens
acttattgcaaagcttatggtgagctctacattcagatgctatcattatactttatcagctgataaacattgagcaagctgttcaacctcttgggttttayatcctcaccagctaagtagggataacactatatggttttaagagttcttatgaggtttagtaatatagcctggcagcagtggtgatggtttatataggcc

SEQ ID NO: 23394 - DNA, 201 bp, Homo sapiens
agttaaatgcccaaacttttggaatttatgttgttcattgttaacaactgctgtgtggcccctttagaagtgtccagtccatgacattttatacatttgtsttgaatcttaaggaaaacatgatcatgtcttctttctcgggtgataagcatgcctcaaaatagttttaattctgtgaatatctttgaattcagtttattt

SEQ ID NO: 23395 - DNA, 201 bp, Homo sapiens
aagtccagggaaataatgggacttattgcaaagcttatggtgagctctacattcagatgctatcattatactttatcagctgataaacattgagcaagctrttcaacctcttgggttttatatcctcaccagctaagtagggataacactatatggttttaagagttcttatgaggtttagtaatatagcctggcagcagt

SEQ ID NO: 23396 - DNA, 201 bp, Homo sapiens
aataattttggtttcaggattattttctattgttgtgttagactcatggaggtagtaaattggcattaattttccttacagtttttctggaagaggaaatrtgcttaatgagctaaataagacataacattttgttttcttacattgttgcaaattgaagttgggttttgttgtttgtttgttttgagatgcaggtctggc

SEQ ID NO: 23397 - DNA, 201 bp, Homo sapiens
atttgattcgctgatttaggcaagtggttctccaacctatgtaagaagcatttgtagagctcgtgaaaacacagttctggggtctatcctgctgattcctstaggtccagaaggtccaagtggggccccagatttgcatttctaacaagcttgcaggtatgtcattgctgctggtccaagaactgtactttgagaatcact

SEQ ID NO: 23398 - DNA, 201 bp, Homo sapiens
ttaatgagctaaataagacataacattttgttttcttacattgttgcaaattgaagttgggttttgttgtttgtttgttttgagatgcaggtctggctgtkttgccaggctgaagtgcagtgtctattcacagatcattaagttgtgcagccttaaacctttggactcaagcaatctcctgcctcagcctcccaagtagct

SEQ ID NO: 23399 - DNA, 201 bp, Homo sapiens
gtttaactgaaggtttgtatcctttgaccaatttcttcccaactcccttagacctccaggccctgataaccaccattctactttctgcttttgtgagttcractttttaagactccacatataagcaagatcatgcactatttgcctttctttgtctggcttatttcacttagcataatgtcctccaggttgatccatatt

SEQ ID NO: 23400 - DNA, 201 bp, Homo sapiens
acctaccacattggattgttggatagattcggtaacttatgtgaaggcagagaacacttggaaatcagtggtggtggaggtggtagtgctaatagtgctawtatcaccatcgtcaatataattatttccacagcagcattttgtttctcatatgtcagttacgtcactgtacttattgtcttgttctcatttcagaatttc

SEQ ID NO: 23401 - DNA, 201 bp, Homo sapiens
ttcaggtttgtttcacatgtttttaattcaggaccaatcacttagagcaaagagtcttaaacattattatatgagaatcacctgtagaatttactaaactmggttactgaatccccctgacaagagtttctgattcagtaggtctgagctggtgcctgagaatgctaacaagttcccaggtgatgctaatgctggtgctaa

SEQ ID NO: 23402 - DNA, 201 bp, Homo sapiens
gtagtttttcagttttagctctttattcgtctttaattcattttgagttgaatgagccacagagtttttttttttaaagattgtttaaaatgtttaacacrtacgttttctgaagatacattataagtcgtatttgagtaaaaaatataatactgaacttaaataatagtagggaggctgaattaacttatttcaagcata

SEQ ID NO: 23403 - DNA, 201 bp, Homo sapiens
attcccagtaatctagtgtcattgtccatgtcccatcaggcttccacatgggccgtacatggctgttgtatgggctgtgcactggccttgtaatgcctccytgggctaactccttaacaatccctgtggtttcattatgtccccccagcaggcagtattgcctcagtgctactacttgctgtgtggggttggcaactatac

SEQ ID NO: 23404 - DNA, 201 bp, Homo sapiens
tttcaagcatacaccatcccctcttgaaagctctcttaatctttaattttttaaaatacattttcttccactaaatacttattttttccaactgactccckaaaactcataaatctacaattgttattacatgagtaatgtaaatatttattcatgccacctgaatcttaaagttccattggttattagctttttgtagtt

SEQ ID NO: 23405 - DNA, 201 bp, Homo sapiens
ttctaatctaggcattcaaagccataaacattcattaagcactgctttagcggcatcacacatatttgatatagtgtattttcatttccatttagttcagyatattttagaatttcccttggtacatctttaaattatcacagtctacctttaagtgttattataccatgtgtacagtataagaaccttagaacaatatat

SEQ ID NO: 23406 - DNA, 201 bp, Homo sapiens
gaaggcattggttaaatcaataacagagtggtagtggtatgtgtccagtgcctctcccaccctctttagaagggaggtgatattgggaacatgtgcatacrttggggggactgccttacttaattcccagtaatctagtgtcattgtccatgtcccatcaggcttccacatgggccgtacatggctgttgtatgggctgtg

SEQ ID NO: 23407 - DNA, 201 bp, Homo sapiens
ttgatgttgtcaacgtgaattgaagtatgtttaatattagagaaagtaataccataataaaatacatgttgctgtcaatacccaaggtctaaaagaaattkgttttttcaagactggagaggacatagaaggctccatggtctagatgacccatctgatacactgacacctgttgtaaaatcccaacccatcatttcttca

SEQ ID NO: 23408 - DNA, 201 bp, Homo sapiens
gtgattgtgtttttaattctgtttatgtggtgtatcacatttattgacttgcatatgttaaaccatccctgcatccctggtatgaaacccacttgatcatkgtggattatctttttagtatgttgttggatttggttagctagtagttttttaagtaaggattttagcatcagtgttcatcaaggatattggtctgtagtt

SEQ ID NO: 23409 - DNA, 201 bp, Homo sapiens
tgcaaattggtcttgactctctgcggcaatggggatgctgaagaaggcattggttaaatcaataacagagtggtagtggtatgtgtccagtgcctctcccrccctctttagaagggaggtgatattgggaacatgtgcatacgttggggggactgccttacttaattcccagtaatctagtgtcattgtccatgtcccatc

SEQ ID NO: 23410 - DNA, 201 bp, Homo sapiens
acggggtttcaccatgttggtcaggctggtctcaaactcctgacctcatgatccgcccacctcagcctcccaaagtgctaggattacaggtgtgagcaccrcgcccagcctactttaatcttctttcttttttttatagtagtctaggcaaagatttgtcaattttgcttatcttttgaaaaaacaactaatgttgatctt

SEQ ID NO: 23411 - DNA, 201 bp, Homo sapiens
tatttactttaatcttcttcttttttttttttttttttttttgagacggagtctcgctctgttacccaggctggagtgcaatggcaccatcttggctcackgcaacctccgcctcctgggttcaagtgattctcctgcctcaacctcctgagtagctgggattacaggcacccgccacaacgcccagctaatttttgtatt

SEQ ID NO: 23412 - DNA, 201 bp, Homo sapiens
taggtttatttaaacatgttctttcatatgtataagactgaactctggagacttaggattttatcttttattattctatagggcctcctaatctctaaagygctatgctcattcttgtctctatttatatgctgttccccctgcttggaatagtcggctgcctctttggccccaattcccattttatcaggttaacatcga

SEQ ID NO: 23413 - DNA, 201 bp, Homo sapiens
atctgaaggcctgtggcaggggtctccaggatctctcacgtttttatagcttttgcaaatcagtaaacttacctattgttcttttctcctttctaacaatscaccatactttatatcctcacatacctacaaacgaagtaatagagttggatgtaggtttatttaaacatgttctttcatatgtataagactgaactctgg

SEQ ID NO: 23414 - DNA, 201 bp, Homo sapiens
tttgttgtgtaaaataggatacgtttatatagagtccagaatcaatacttcagagtgggaaagaatctgaaggcctgtggcaggggtctccaggatctctyacgtttttatagcttttgcaaatcagtaaacttacctattgttcttttctcctttctaacaatgcaccatactttatatcctcacatacctacaaacgaa

SEQ ID NO: 23415 - DNA, 201 bp, Homo sapiens
ttgcttgaacccaggaggaggaagttgcagtcagccaaaatcatggcactgcacttcagcctgggcaacagagcaagactgtctcaaaaaaaaaaaaaaaagtaattgcaaaaactgcaactagaatagaataatcgactactctttcagagataatttagtacattcccttatttcacagatgaggagagactatgtgat

SEQ ID NO: 23416 - DNA, 201 bp, Homo sapiens
taggggtcctggaaccgataccccatagatactaagggatgactgtatcctatcagacttttccaaagtacacacacacacacacacacacacacacacamgcacgcacacacatgtaatcagatgcattgttggcagtattgatgaagacaatatttattgatatatcgtgctgtggaaatcagggagaaatgtgtactg

SEQ ID NO: 23417 - DNA, 201 bp, Homo sapiens
ccatagatactaagggatgactatatcctactagacttctccagagtatacacacacacacacacacacacacacacacacacacacacacacacacacacggacatgtaatcagatccattggtggcggtattgatgatgacaatatttattgatatattgtgctgtgctgtggaaatcagggagaagtgtaaactggag

SEQ ID NO: 23418 - DNA, 201 bp, Homo sapiens
ccatcgatgctttgaagaaactgcatcaattaacaggcaaaatacccatctaacatcataatgacaggattaaattcacacataacaatactaaccttaartgtaaatgggctaaatgctccaattaaaagacacagactggcaaattggatagagtcaagacccatcagtgtgctgtattcaggagacccatctcatgta

SEQ ID NO: 23419 - DNA, 201 bp, Homo sapiens
actgcatcaattaacaggcaaaatacccatctaacatcataatgacaggattaaattcacacataacaatactaaccttaaatgtaaatgggctaaatgckccaattaaaagacacagactggcaaattggatagagtcaagacccatcagtgtgctgtattcaggagacccatctcatgtacagagacacatacaggctc

SEQ ID NO: 23420 - DNA, 201 bp, Homo sapiens
atggaggaagatctcacaagcaaaaggaaagcaagaaaaatcataggttgcaatcctagtctctgataaagcaggctttaaaccaacaaagatcaaaagaracaaagaaggtcattacataatggtaaagggatcaattcaacaagaagagctaactatcctaaatatatatgcacccaatacaggagcacccagattcat

SEQ ID NO: 23421 - DNA, 201 bp, Homo sapiens
cctatggggttgacaacttttccagttgctctaggaattactgtaatcattttctttctgttatactgccttatagatctgatggaaattttgaaaagagygtgttctcattgtttagctctatatatctgttggcttcatttgcttttaatatttttttctaatagatacctttctggcttgcacagcaaagttcaatta

SEQ ID NO: 23422 - DNA, 201 bp, Homo sapiens
cattcttctcagcaccacgtcgcaattactctaaaatcgaccacataattggaagtaaagcactcctcagcaaatgtaaaaacaggaatcacaacaaactstctctctgaccacagtgcaatgaaattagaactcaggattaagaaactcactcaaaaccgcacaactacatggaaactgaacagaacagcctgcccctga

SEQ ID NO: 23423 - DNA, 201 bp, Homo sapiens
ttatttacatgctgtaagtaatatagtaatgctaactgggctttccttggcttttgtttcattgtgatctgagctcagattatagtttgatctgctatgcrctgacctgggtgccagatgcaagggaagccagtaaataatactataaagagagatgctagctttagttttgaaaggacgatgacttgtaagtgagactgt

SEQ ID NO: 23424 - DNA, 201 bp, Homo sapiens
gacatcacaattaaaagaactagagaagaaagaggaaacatacaaaagctagcagaaggcaagaaataactaagatcagagcagaactgaaggagatagasacacacaaaaaacccttcaaaaaatcaatgaatccaggagctggttttttgaaaagatcaacaaaattgatagactgctagcaagactaataaagaagaa

SEQ ID NO: 23425 - DNA, 201 bp, Homo sapiens
aagaagacatttatgcagccaacagacacatgaaaaaatgctcatcatcactggccatcagagaaatgcaaatcaaaaccacaatgagataccatctcacrccagttagaatggtgatcattaaaaagttgggaaacaacagatgctggagaggatgtggagaagtaggaacgcctttacactgttggtgggagtgtaaat

SEQ ID NO: 23426 - DNA, 201 bp, Homo sapiens
caaccacattgagccgcatggccgcataggggactatgaagatcagctcatgcatttgtgaagcactgcctccttgtgtcttactgttctctttcttaatkggctgtgttctggaatggtgtcttggtgttatgttttaaaacattattttgcgtaatttatgtcattttatagtcagccaggagaaagtacactacatta

SEQ ID NO: 23427 - DNA, 201 bp, Homo sapiens
ttgacccagccatcccattactgggtatatacccaaaggattataaatcatgctgctataaagacacatgcacacgtatgtttattgcagcactattcacratagtaaagacttggaaccaacccaaatttccatcagtgatagactagattaagaaaatgtggcacagatacaccatggaatactatgcagccataaaaa

SEQ ID NO: 23428 - DNA, 201 bp, Homo sapiens
ccataacagatccccaggttttttccttgtctattaggaactgtttaaaaaattttgtttaagaaacaaatgtatctccattcatattcttgaacaacacytctaattaatgaattactcagaaattttgctgatgaaaacatgttatgaaatctgtatattgtataagacctttgcttccctgagagaaatcactcccat

SEQ ID NO: 23429 - DNA, 201 bp, Homo sapiens
atactatgcagccataaaaaaggatgagttcatgtcctttgttgggacatggatgaagctgggaaccatcattctcagcaaactatcagaaggacagaaarccaaacaccacatgttctcactcataggtgggaattgaacaatgagaacacttggacgcagggcagggaacatcacacactggggcctgtcaggtggtgg

SEQ ID NO: 23430 - DNA, 201 bp, Homo sapiens
  misc_feature (1)...(201): n = A,T,C or G, or insertion/deletion polymorphism (see Tables 1-2)
tactacttacttacttacttacttacttacttacttacttatatatgtctgtaagtacgtgacagagtctcactgtggcacccaggctggagtgcagtatnatgatcttggcttactgtaacctctgcctcctgggtccaagtgattcttgattctcatgcctcagtctcccaggtagctggcaatacacgtgtgcacagt

SEQ ID NO: 23431 - DNA, 201 bp, Homo sapiens
gatgttgtcaacgtgaattgaagtatgtttaatattagagaaagtaataccataataaaatacatgttgctgtcaatacccaaggtctaaaagaaattggktttttcaagactggagaggacatagaaggctccatggtctagatgacccatctgatacactgacacctgttgtaaaatcccaacccatcatttcttcatc

SEQ ID NO: 23432 - DNA, 201 bp, Homo sapiens
tttgcgtgttgatctttctctactttttagtgttcttaaaggtaaggaccaagtcatatgcttctgtattttcctcacagtgctttgcacaaaaaaaaaamattgtctagtaggtgtctttttagttacttttaaagtatcttgtgggtagttaagacttttttattcaaattttatataaaatctgtttttgttttctga

SEQ ID NO: 23433 - DNA, 201 bp, Homo sapiens
ttacctgtgtgtgatgttgaacaaatttacctaaaggctttcaaatcagtttcttcatttataaattgggggtagggggaaggattttacctaccacattrgattgttggatagattcggtaacttatgtgaaggcagagaacacttggaaatcagtggtggtggaggtggtagtgctaatagtgctaatatcaccatcgt

SEQ ID NO: 23434 - DNA, 201 bp, Homo sapiens
  misc_feature (1)...(201): n = A,T,C or G, or insertion/deletion polymorphism (see Tables 1-2)
cctggctaatttatttcattttattttatttgtattttagtagagatagagtttcaccatgttgcccaggctggtctggaactcttgagctcaggcagtcngcccacctcagcctcccaaactgctgggattacaggcgtgagccactgcccccaaccaactcacacatactttaagtgggactttatttaatatcttcat

SEQ ID NO: 23435 - DNA, 201 bp, Homo sapiens
gttgtaatatatgtcaccaaattcatggctaaatcatagaaattgatctgtcacagcttgttaaataagtattctttctcttacatgacttcttacgtgattttttccaaactgcttagtcaaagaagataatctttccagatagagaaaattttaaaatatctttattcctctttaaatttactgatttataaatactgg

SEQ ID NO: 23436 - DNA, 201 bp, Homo sapiens
tcccaacccatcatttcttcatcctttgcttattcacccacactgatggggaactattaattcacgaaatagaccatttcatttttgtgtcagactattargaagttctttaatctgatgaacaagcagctgtttgtctccctaaaccctctatacctctacctgattttattccaaagtctgtaaagagcagtttttaat

SEQ ID NO: 23437 - DNA, 201 bp, Homo sapiens
tcttcatcctttgcttattcacccacactgatggggaactattaattcacgaaatagaccatttcatttttgtgtcagactattaggaagttctttaatcygatgaacaagcagctgtttgtctccctaaaccctctatacctctacctgattttattccaaagtctgtaaagagcagtttttaatccttcttctatatgg

SEQ ID NO: 23438 - DNA, 201 bp, Homo sapiens
tattgtatttaattcctcctttataaagaagttttaactaaactttaaaattattttttattatctggtgtaccaggattgtgtgggtaatattctttttrtttttaggtctcattcagtatctctgtttttttgataaaacaagggtcagcaaactttctctgtaaaggtctgggtagtaaatattttaggctatgcagg

SEQ ID NO: 23439 - DNA, 201 bp, Homo sapiens
tcagactattaggaagttctttaatctgatgaacaagcagctgtttgtctccctaaaccctctatacctctacctgattttattccaaagtctgtaaagarcagtttttaatccttcttctatatggtgttcctttattttttaaaactgttagttatcttgtctttacactttatctcactaaccagtcttttgtttttc

SEQ ID NO: 23440 - DNA, 201 bp, Homo sapiens
tattttttaaaactgttagttatcttgtctttacactttatctcactaaccagtcttttgtttttcaggcttgacattttggattatttcatatgccattstttttccgtctaaagcattctcatctttttcttgtgaactatttgtcctttttgctctgaagttgtaacatccaccaacaaatatatattgattggttgt

SEQ ID NO: 23441 - DNA, 201 bp, Homo sapiens
ggcctcccaaagtgctgggattacaggtgtgagccactgcgcctggccctcctcctctattttttttttacagccctttaaaaatgtagaagctggccaascacggtgattcacacatggtagttccggcactttgggaggcaaggtggacagattgcttgatcccaggagctcaagaccagcctcggcaacatggcaaaa

SEQ ID NO: 23442 - DNA, 201 bp, Homo sapiens
ctctaccctgaataccttgcttctcctaatgcattccaggattttgttagctttgttgtcagctgcacattgagattgctattgaataaagtcatcaggarcaacaacaaaggtgaaaagcccaggtctttcttcaaagtctgctaaataatagttttcacgccttgggcttgtgcagttaatttgatttaagtttcagca

SEQ ID NO: 23443 - DNA, 201 bp, Homo sapiens
aaataataataaattaataaaaatgtagaaatgattccaagctaaagtgctctatgaaaataggtttggcccactggctgttttggggcctagttctagaycaagttctgccccaaactaattgtgtgctttggggtagtttgtataattggttttatcttctctggctattttatgaagataatctagtagtcacttcat

SEQ ID NO: 23444 - DNA, 201 bp, Homo sapiens
aggcctcccaaagtgctgggattacaggcgtgagccaccgcgcccggccccagcatgatcatttctaaagtgaaaataaacagtgaaaagccattagtaasttgccaataatgttgattctttggttagcgtgataaatcaaatttcccagaggcagtcacataaattatagcattatgttgctaagatgaatttggccaa

SEQ ID NO: 23445 - DNA, 201 bp, Homo sapiens
cagggagcccctaggtctgggctccccagagggctgcaactcttctccttctcatcaccctcaatgtggcaagtcagggttgggggtgtttttcagctttstttgtgttactgctctttcagtccctccgtttggtgggtcctgagttcttgtcccgtgtccaggaccagtgaggtatgtggacaactggagggtgagcaa

SEQ ID NO: 23446 - DNA, 201 bp, Homo sapiens
tccatagatactaagggatgactatatcctactagacttctccagagtatacacacacacacacacacacacacacacacacacacacacacacacacacacggacatgtaatcagatccattggtggcggtattgatgatgacaatatttattgatatattgtgctgtgctgtggaaatcagggagaagtgtaaactgga

SEQ ID NO: 23447 - DNA, 201 bp, Homo sapiens
agggctgcaactcttctccttctcatcaccctcaatgtggcaagtcagggttgggggtgtttttcagctttctttgtgttactgctctttcagtccctccrtttggtgggtcctgagttcttgtcccgtgtccaggaccagtgaggtatgtggacaactggagggtgagcaaggtggaaaggactttaattgaacaacaga

SEQ ID NO: 23448 - DNA, 201 bp, Homo sapiens
ctccatagatactaagggatgactatatcctactagacttctccagagtatacacacacacacacacacacacacacacacacacacacacacacacacacacggacatgtaatcagatccattggtggcggtattgatgatgacaatatttattgatatattgtgctgtgctgtggaaatcagggagaagtgtaaactgg

SEQ ID NO: 23449 - DNA, 201 bp, Homo sapiens
tgctccattgttgagggttggtactgtctaaagttaaaccatttcagtgatgcctagcatggaacacttgacaaccaaccttccaggtaggaaatgagacktccttgccagcaagtccatataatactacaatttttatgactagactatttttgcagaagtacttattgcttaattgacattaaacttaagtaagtctat

SEQ ID NO: 23450 - DNA, 201 bp, Homo sapiens
actccatagatactaagggatgactatatcctactagacttctccagagtatacacacacacacacacacacacacacacacacacacacacacacacacacacggacatgtaatcagatccattggtggcggtattgatgatgacaatatttattgatatattgtgctgtgctgtggaaatcagggagaagtgtaaactg

SEQ ID NO: 23451 - DNA, 201 bp, Homo sapiens
cggctgctttgtttactgaagcaagcctgggcaatggcgggcgcccctcccccagcctcactgccgccttgcagtttgatctcagactgctgtgctagcamtcagcgagactccgtgggcgtaggaccctccgagccaggtgcgggatataatctcctggtgcaccgtttcctaagcccatcggaaaagcgcggtattagg

SEQ ID NO: 23452 - DNA, 201 bp, Homo sapiens
ctgaagccttcctctctcaacttgtcaaagtcattctccgtccagctttgttctgttgctggtgaggaactgcgttcctttggaagaggagaggcgctctsctttttagagtttccagtttttctgctctgttttttccccatctttgtggttttatgtttgtttggtctttgatgatggtgatgtacaggtgggtttttg

SEQ ID NO: 23453 - DNA, 201 bp, Homo sapiens
tagtctcaatggtctttacatttttgcatgattttgcagcagctggtaccggttgttcttttccatgtttagtgtttccttcaggagctcttttagggcasgcctggtggtgacaaaatctctcagcatttgcttgtctgtaaagtattttatttctccttcacttatgaagcttagtttggctggatatgaaattctggg

SEQ ID NO: 23454 - DNA, 201 bp, Homo sapiens
ccatcaatacctaatttattgagagtttttagcatgaaggttgctgaattttgtcaaaggccttttctgcatctattgagataatcatgtggtttttgtcwttggttctgtttatatgctggattacatttattgatttgcatatattgaaccagccttgcatcccagggatgaagcccacttgatcatggtggataagct

SEQ ID NO: 23455 - DNA, 201 bp, Homo sapiens
gagatttgcaacaatttgaaaaagcttgctttttctttagcttactttattgtaagaatacagcatataatacatataaaaaatatggttaatcagctgtktatattattggcaaggcttcaggtcaacaataggctattagtagttagtttttgggggagtcagaagttatgcatagttttttgactgcacagggattgg

SEQ ID NO: 23456 - DNA, 201 bp, Homo sapiens
cggctagggtaccttgtgaccatgtcttccaagaagaatagaaagcggttgaaccaaagcgcggaaaatggttcgtccttgccctctgctgcttcctcttstgcggaggcacgggctccttctgctggatcagacttcgcggcaacctccgggactctgacggtgaccaacttattagaaaagggtaaagaattccgggtg

SEQ ID NO: 23457 - DNA, 201 bp, Homo sapiens
cagccactagggaggctgaggcaggagaatcttgcagtgagctgagactgcgccactgcactccagcctgggtggcagagtgagactctgtctcaaaaagaaaaaaaaaaaaacaccaagtgctgggattataggcgtgagccaccatacctgtccttaaaccatattttagtagttatttaaggaagttacaaaaaaaat

SEQ ID NO: 23458 - DNA, 201 bp, Homo sapiens
tgagtgcaaattatttgcacatttttgaaaagagaatagtcatcttttattcacctgataattgctgagaagggcaaacctcccataagtactgcttttctatttttttttttttttttttttttgagacagagacctcctgctccacccacctcagcatcccaaagtgctgggattacaggcgtgagccaccgcgcccag

SEQ ID NO: 23459 - DNA, 201 bp, Homo sapiens
gagtgcaaattatttgcacatttttgaaaagagaatagtcatcttttattcacctgataattgctgagaagggcaaacctcccataagtactgcttttctatttttttttttttttttttttttgagacagagacctcctgctccacccacctcagcatcccaaagtgctgggattacaggcgtgagccaccgcgcccagc

SEQ ID NO: 23460 - DNA, 201 bp, Homo sapiens
caccatctccctctcaaacaaccagttactttactctaggacaagaatccaccatgcaaggtccctcatacaaaatcactttctttatatccctccccacaaaaaaaaaaaaaaaaaaaaaaaatatatatatatatatatgtgtgtgtgtgtgtatatatatatatatcttttatccacactttcctcacatccctcttt

SEQ ID NO: 23461 - DNA, 201 bp, Homo sapiens
accatctccctctcaaacaaccagttactttactctaggacaagaatccaccatgcaaggtccctcatacaaaatcactttctttatatccctccccacaaaaaaaaaaaaaaaaaaaaaaaatatatatatatatatatgtgtgtgtgtgtgtatatatatatatatcttttatccacactttcctcacatccctctttt

SEQ ID NO: 23462 - DNA, 201 bp, Homo sapiens
ccatctccctctcaaacaaccagttactttactctaggacaagaatccaccatgcaaggtccctcatacaaaatcactttctttatatccctccccacaaaaaaaaaaaaaaaaaaaaaaaatatatatatatatatatgtgtgtgtgtgtgtatatatatatatatcttttatccacactttcctcacatccctcttttt

SEQ ID NO: 23463 - DNA, 201 bp, Homo sapiens
ccaaagtgctgggattacaggcgtgagccaccgcgcccggccccagcatgatcatttctaaagtgaaaataaacagtgaaaagccattagtaacttgccartaatgttgattctttggttagcgtgataaatcaaatttcccagaggcagtcacataaattatagcattatgttgctaagatgaatttggccaaattatgc

SEQ ID NO: 23464 - DNA, 201 bp, Homo sapiens
agttaacctttagctactgagttggtgctgtacctgtttatctcgtttaatttttattctatctcatatgaggtagatgttgttatgcccattttactgtkttttattatctatctagtattcaaaggttcataacatcaaaaaagtcataataactgttacaatagctactgtagatccttatttttgacactacccttt

SEQ ID NO: 23465 - DNA, 201 bp, Homo sapiens
cagttactttactctaggacaagaatccaccatgcaaggtccctcatacaaaatcactttctttatatccctccccacaaaaaaaaaaaaaaaaaaaaaawatatatatatatatatatgtgtgtgtgtgtgtatatatatatatatcttttatccacactttcctcacatccctctttttattcattgattccctcttat

SEQ ID NO: 23466 - DNA, 201 bp, Homo sapiens
ttgagatggagtctcgctctgtcgccaagctggagtgcagtggcaccatctcggctcacggcaacctctgcctcccgggttcaagcgattcttctgcctcagcctccggagtggctgggactacatatgcccgccaccacgcccggctaattatttgtattttagtagagatgtggtttcaccatgttggccagggtggtc

SEQ ID NO: 23467 - DNA, 201 bp, Homo sapiens
atagtgccttttcagaatgaggcaatttgacatcattgtttttgcctaagacagcttttagagtttagtctagaagttgttcaaatagaagttggtgacaygttgaagctgaatgccttcttttcttaaaaggtaggaaatgctcttctcatttgtaagttttagttttctacagtctaataatcttataaaaggtacatc

SEQ ID NO: 23468 - DNA, 201 bp, Homo sapiens
agttctcactctgggccgaggtctccacatggaactggcagcccagcccccaggcttcaggctgtccatgtcttgaaggtggggtttcaccagggacccayccctttgcacccaggagcctgtctgccttctgtcaccaggaatgtgccatccatggcccccaggctgtttgtgccaaggagtgcctgaagccctatggca

SEQ ID NO: 23469 - DNA, 201 bp, Homo sapiens
tgtgcaggtttgttacataggtaaactgcatgtcatgggggtttcatgtacagatcatttcatcatgcaggtaataatcacggtatctgataggtattttwtctgatcctctccttcctccaaccccctagcctcaagtaggccccagtgtctgttgttcccctctttgtgtccatgtgttcttgttgtttaccttcttat

SEQ ID NO: 23470 - DNA, 201 bp, Homo sapiens
caaagctctaatgaatgccactacatggtggagcttgagaactcactgagctacccaaaagactagtttgtcattgcagtggctcctagacattgctttaygaggaaagaaaagaggaaagaggatgagcctagatacaaagggaaaggcttgggaaaaagaaactacatccatgatttttatagtgcctcttttgttact

SEQ ID NO: 23471 - DNA, 201 bp, Homo sapiens
tataatagttatattttttattttttgaggaccctctgtgctgttttctgtaattgcttatagaaattgactagttgacattcccatgtagaaaaagggaycccttttttctacatccttgccaaccctaatttttttatcttccaacttaatttttttttcctgttggctaatacaactttggcctgtcaaatcatggta

SEQ ID NO: 23472 - DNA, 201 bp, Homo sapiens
gtgagccccgccctcccaactcagtaggggccagggctcctgcccgttcgcagccttgacggcttggcagagcttgcaactctagccgcacctacccagtrcagcgggcgtcctcacagccgcgctccagacgggccgctgctgccatcattactcccaagtttcgggtcagaaataagtagaattttagtgctggagaga

SEQ ID NO: 23473 - DNA, 201 bp, Homo sapiens
ggaaccaatcctctgcagataccaagacaactgtatatactttgtaaagcttgtataagatgatactcataaagcatttaacagataatgtctcaataagtgttttaattgttatatcattacaactatcaccattataatctcaacagggaaagcctttcataatcacagctgattaaaatacctttttagtattcaggc

SEQ ID NO: 23474 - DNA, 201 bp, Homo sapiens
aaagaggatgagcctagatacaaagggaaaggcttgggaaaaagaaactacatccatgatttttatagtgcctcttttgttactattgttttgtaaataarataggtagcaaatccagtcattcaaaattataaataaccactaaagggagaagtcaatgctcactttagcttggtttctgctgttgttctttatggtgtg

SEQ ID NO: 23475 - DNA, 201 bp, Homo sapiens
tcttagagaatttgatttcttaataaaaatttggctaactagatattttacatgtaaatcttttagagaatttattcagcaacaaaaatcagttatgtgtrtattgacagtttctaatctaattttcataaatataactaaaattatgaaaatgtacttaaaaaaaaaagctagattatactcctgtctcctagaagggac

SEQ ID NO: 23476 - DNA, 201 bp, Homo sapiens
cagaaaaacccagaaatattactctaagataataacaattattaccacttttatttgagcacatgcactataccaggcacagcacaccgtgctttatgtayataatctgtaactctcctgacaaccctgcaaagtagtacctctgtttacattttgaagatgagaaaattactgctcaaagagattaaatagcttgccatg

SEQ ID NO: 23477 - DNA, 201 bp, Homo sapiens
ccaaaaattttgaaaaaaagaaaacaggcactgtggctcacacctgtaatccctgcactttgggaggctgaggtgggagaatctcttgaaccaaggagttsaagaccagcctgggcaacatggcaaaaccccatctgtccaaaaaatacaaaaattagctgggtatagtggcacatgcttgtagtcccagctactctgcag

SEQ ID NO: 23478 - DNA, 201 bp, Homo sapiens
atactttttatccatactttatttaaaaattttatgtgttagaaaacttatactctagacatttaaaatttaaattttcataacatagtatgcttctgaawaacctgagaagaatgttacacaaaaggagatggcttgctgattccgtggagtaataaatgcctacctgttttcattttgaagttgaagccattgcttcta

SEQ ID NO: 23479 - DNA, 201 bp, Homo sapiens
cccataactcattttctcataaattgtttcctagagaagcctcctttttcagctagagccctttggatgccttttttcttttcttttttttaatttgactyttccaacgtagttgaaacacagaatctccgttaaccctcaatgtacactggtcttaatcagatcaagtttttaaccacaaggtaaaatgtttcactttgc

SEQ ID NO: 23480 - DNA, 201 bp, Homo sapiens
tcattttctcataaattgtttcctagagaagcctcctttttcagctagagccctttggatgccttttttcttttcttttttttaatttgacttttccaacktagttgaaacacagaatctccgttaaccctcaatgtacactggtcttaatcagatcaagtttttaaccacaaggtaaaatgtttcactttgctcatgaat

SEQ ID NO: 23481 - DNA, 201 bp, Homo sapiens
aacttaactgcttccttctttcacatatcagtttctcttccatcagagagaatagtgatatggaatcattttgtctgaatggttggctaaaagtacatacygtagaaggtagaaacttaaatacaggataatgaattttttttatatctgattcccattagcattgacattttttttttctgtttccagaccataaaagct

SEQ ID NO: 23482 - DNA, 201 bp, Homo sapiens
tctcagcagagaggaggccctgaagagggtagactcctctctgatgttgatcatcctgacctcagcagctctcagcagagagggtagctcctctctgcagycggtccctccactggctctgctctgctctggctgagtccagggcttttatgagcctcagaggggaggaagtgcatgccgattggtccatgggcctgcggt

SEQ ID NO: 23483 - DNA, 201 bp, Homo sapiens
tttatttttcatgagcccatgtagtatttaaattttttaaaaaatgcaatttatcttattgcaattggtatcagattgtaactctttttgggtaaagactstattttgcatatcttaagtgcttgactgtgcttagcattctaccttataaattgatggtattctatgaatatttattttctaacatttttatttcctctg

SEQ ID NO: 23484 - DNA, 201 bp, Homo sapiens
ggtggggcgcgaggttgaggctgcaatggcggctccgaacttagtagcaggtcctgctacctgtgcgagggtggaggtggcacagtccaccttgaggacaygggacacaggagactgttgccactgctgctctcacagttgcttctgctatcctgtctgcctccttgcagcctggagcagggctccaggccatcgctgggc

SEQ ID NO: 23485 - DNA, 201 bp, Homo sapiens
tcaacttgaatctttagttgttccctaagttcattctggaatggctgaaaccacttataaagaagaaagtattaagggcattgagttacccaacgtattarttgttatcgctgaattctacttttaaccaggaatatactttggtcttcgttcaaaagcacatcatttttttgtaattaaaatatatatggagacaatata

SEQ ID NO: 23486 - DNA, 201 bp, Homo sapiens
tcttacgctttttgcccaggccggagtgcagtggcgcagtcttggctcactgcaacctctgcctcctgggttcaaatgattctccttcctcagactcctgmgtagctgggattacaggcatgcactacaacgcctggctaatttttgtatttttaatagagacggggttccaccatgttgaccagtttggtcctgaattcc

SEQ ID NO: 23487 - DNA, 201 bp, Homo sapiens
ataattatatatttattataatatatattgatataaaggatccagttcatcagtcttttccttcgtggctggtgatttttgtagctagcttaagaaatctyggtcaaatctactgttaggtatattttctcttaccttcttgatgcttttattgtttttcctttcatgttgctatctttaattgcttcactttttttcata

SEQ ID NO: 23488 - DNA, 201 bp, Homo sapiens
ctcttccacatggcctttctacagcatgggcttctcacagcatggcagccgagttccaaggcagaacatttcaagccttggaaaggaaaagctgcagatcyctgaaggctcactctgaatttatactatgtcactttgccaattctcttgtcctttgttttgatagagcatctcacagggctagcccaaatttcatgtaga

SEQ ID NO: 23489 - DNA, 201 bp, Homo sapiens
aaagcctacttgatcatggtggatttgctttttcttgtgctactggattcggtttgctagtattttgttgaggatttttgtatcgatgtctatcaagtatrttggccttaagttttctttttttgttgtgtttctgccaggtttgggtatcacaatgatgctggcctcatagaacgagttggagagggatccctcctccct

SEQ ID NO: 23490 - DNA, 201 bp, Homo sapiens
atgtcaaagaaatctgaaatgttttaatttttctcctactgtgagtttgcttcatctctacttgaaaaatgaagagtttcttttaggccaggcgcggtggytcatgcctgtaatcccagcactttgggaggccaaggcgggtggatcaccttaggtcaggaattcgagaccagcctggccaacatggtgaaaccccatctc

SEQ ID NO: 23491 - DNA, 201 bp, Homo sapiens
aggaaatcacttgaactcaggaggcagaggttgcagtgagccaggatcatgccacggcactccagcctgggtgacagagcaagactccatctcaaaaaacaaaaaaaaaaagcttttatagaactaatgtatataaaatatacatacaagttggaagtatagcaaagagataaataactcagtttctgaaattaggaaaag

SEQ ID NO: 23492 - DNA, 201 bp, Homo sapiens
gaaggactggaggactgatgtggtttctcaaggccgacctcattcctgctgattctaacacctagcccttcagtgtttctgctggcatgtgtggtttcaacccctgtcacattcagacactctcatctaacagggcccagggtatttaatcagtttcatttgctaatcaggcctcattggtcccggcctttggtatctgtt

SEQ ID NO: 23493 - DNA, 201 bp, Homo sapiens
tgttttttgtctttttagtaacagctattctgaccggggtaagatgatatctcattgtggttttaatttggagttctctgatgaatagtgctgctaagcatttttttatacggttgttggccatttgtatgtctttttttgtgtgaaaaatgtccatctgtgtcctttcccacttttttttttaagttccagggtacatgt

SEQ ID NO: 23494 - DNA, 201 bp, Homo sapiens
agaaaaaggataattttaaacttataagaagtttaaaaataagcacattttattgttgggtttaattttttattcatggataaattagctgatgtagagaractagttttttctttctatctcaattcctttttgaatgaaatttagaggtgaaataaatattacaatgtcatgtctgtaatacttttaaaaatatttgta

SEQ ID NO: 23495 - DNA, 201 bp, Homo sapiens
tggtggacagaagtcccagccttgacagaagcaactgggggagctctccttgaaaggcactgaggtctttgcaggagaaagggagggagccacctcagctyctcttccagaccagcacgaaagcaatctgcctccctgtcacactcatgtcgcaatgttctggatattcagatcagacgaggcacttctgtggatctgcag

SEQ ID NO: 23496 - DNA, 201 bp, Homo sapiens
gtggctcctctctgcaggcaggttgtcccgacgaatgttcagctcttagcagagagggtagctcctctctgctgctggtcatcctgttgtctgcagctctyagcagagaggaggccctgaagagggtagactcctctctgatgttgatcatcctgacctcagcagctctcagcagagagggtagctcctctctgcagccgg

SEQ ID NO: 23497 - DNA, 201 bp, Homo sapiens
ccaaagtgctgggattacaggtgtgagacaccacgcccagcttcatttgaatattggaaatacactgttcctaagtaatggtcctgggaactttacaacartactgtgactattctcttttcaaaaatgtgtatcggcttaaatatttaagagatgggaaagagaagttcctgatgacattgtatgcaccacggtagcagg

SEQ ID NO: 23498 - DNA, 201 bp, Homo sapiens
ggatgatatctgtggcctagaaatcagttgtatagcccaaaatgttacctagactactaatgaacagcaaggtctaaggaaatggcaactagaggccgggygtggtggctcatgcctgtgatcccagcactttggggggccgaggctgtcagatcacaaggtcaggagatcgagaccatcctggctaacggtgaaagcctg

SEQ ID NO: 23499 - DNA, 201 bp, Homo sapiens
tgaggcaggagaatggtgtgaaccccagaggcggagcttgcagtgagccgagattgtgccactgcactccagcctgggggacagagtgagactccatctcaaaaaaaaaaagaaaagaaaaaagaaaatggcaactagaaacaagcagccccattgcagcacgctgaacaccgttttttggaagcatgcaccactgagcag

SEQ ID NO: 23500 - DNA, 201 bp, Homo sapiens
atgcagctaaacccactctggactcttttttttttttggcaactacctagacgcacagtggttccatagtgcctgctctaccatgctataagcttagggarggctttgctccagaaaaggaacctgtaattagctcatgtgagtgagtagatagccacatctaataaaaggttaagtattaggaaattcttgtgactatac

SEQ ID NO: 23501 - DNA, 201 bp, Homo sapiens
ctatccagccctcctaaggatcttcacttcctccccctagaaaactacagagttgctctgttgtcacagtgtgaaaacacacacacacatgcatgcgtgcrtacacatacacacacacacacacacacacttgatttggtgcataggaagtgacctaattcagtttgtcctcatcatagtgacaactagactgagccaatc

SEQ ID NO: 23502 - DNA, 201 bp, Homo sapiens
attgcagataaactattattacaggttattcctaataaacttttagttgctgaatgttaacaataacaatctttacttttaaagcactatagacaaaagtktaatttttatttagcaccaataaataaatgatttaacattttaaagtatttaataagactgaaacccacagcaaagctgttctctggtgtacaattactg

SEQ ID NO: 23503 - DNA, 201 bp, Homo sapiens
tgacattgccgcaagttccccctgtggacccggctctcggtggcagcctggggctcctcctcgcacagcttgagaccctgccggggggcacctctggggcrgatcgcgggccccaaacccagttgtcgggagcgccaggctgaacagtcactccgacgtggggtggatcctggggttgcagcgtcggtggcccgggctgag

SEQ ID NO: 23504 - DNA, 201 bp, Homo sapiens
ccctcctaaggatcttcacttcctccccctagaaaactacagagttgctctgttgtcacagtgtgaaaacacacacacacatgcatgcgtgcatacacatacacacacacacacacacacacttgatttggtgcataggaagtgacctaattcagtttgtcctcatcatagtgacaactagactgagccaatcagagactt

SEQ ID NO: 23505 - DNA, 201 bp, Homo sapiens
ctcccttcactctgtgcgcaactgcagcacccctgggtccaactctgccttgagacccctccatgccagaccgtgctcttcccccgcctgcaggtaggtcrgcccggccccacctgagtggatcccagggttgggcttccagggcagcaggccccaggtaccgttcgccttggagtccacctgaggatccacagcctgcac

SEQ ID NO: 23506 - DNA, 201 bp, Homo sapiens
ggcccggccccacctgagtggatcccagggttgggcttccagggcagcaggccccaggtaccgttcgccttggagtccacctgaggatccacagcctgcamccccacctgcacccacacccgtgccccaccacagccggtcccggctgccaaagtggcagtgactactttggatggcccgctgctgccatcaatttgaatg

SEQ ID NO: 23507 - DNA, 201 bp, Homo sapiens
ccagcttccctatatttttccccatcctaccagcaaactttgtttatataaaatgcagccaaatacaattaagccaaatacaagtcaaatcttcctcatcmttccattcatttcctcattctttcatttgttaccatccttgtttttttttttttattgagacggagtctctgtcacccaggctggagtgcagtggtgcat

SEQ ID NO: 23508 - DNA, 201 bp, Homo sapiens
gtttatattttgccgtccttgttgagaagaaaaacatggatgtatagatatacagtgatggatggactagcagcttaagaatcattttggggacatttttwaaaaaattttttgagacagagtcttgttccatctcccaggctggagttcagtggggcaatcgtggctcactgcagccttgacctcatgggctcaggtgat

SEQ ID NO: 23509 - DNA, 201 bp, Homo sapiens
tcattttttaaaagatattttgttaagatggtattttgaattggtaacatatgtatataattcagagatcaaaactgtatggaaagatatacatgctcatwccttgttccttctaccactgtaccccaacctttccaccttacttttattagtctcttgtttcttcttccaattttttaacacaaacaaaaaatatgcaaa

SEQ ID NO: 23510 - DNA, 201 bp, Homo sapiens
tataaaatgagttgaaaagattattaataatcttacacagaatgatgtccttcagttcaaagatgttaccagtattaacagtggcacttgttttaaaagartaaatatcctactcttgtttttcattagaactctaagcaagactacaaacaaagttttcattgcaataataaatctttttgaaagggttttctgaaacca

SEQ ID NO: 23511 - DNA, 201 bp, Homo sapiens
aaaagtgaataagaatatacaaaacaataataataacagaaacagtgcattagatgaaagttcaaagtcttttgtggctgattgaaaaatgtaataggacygctaatgccttttatggaaagaagcaatataaactagtaatttaatgctttactccatttctacatagcatcttttaaaatttatttttagtatatcttg

SEQ ID NO: 23512 - DNA, 201 bp, Homo sapiens
ggaaactatgtatacccttcagtactttgcttttttgatttagctctgtttcttgcagatctttttctctcagtaaatgggcattttcctcatccttttgwaggatgcatggatgaagaactaccatagttattcaaccagtgccttattttatggattcttaggctattgtcagtcttttgccactattaacagtactac

SEQ ID NO: 23513 - DNA, 201 bp, Homo sapiens
taattgttaaactagaattttggaatcagtattttttactcatgttttgtttaccggtaagtcaccttgcttattacagtgtctcaacgtattaagtgttyagtaaattttcattgaatggaatagaaggaaaagaggtagtatggaaatagactcaactgattctaattatgcacccaaaacaagaaagcaaaggttacg

SEQ ID NO: 23514 - DNA, 201 bp, Homo sapiens
tagaaatttaagtctttgaagagaggaaactgtattattggatattttttgttttattttttgtttttgagacagagtctcgccctgtcacccaggctggmgtgcagtgacacgatctcggctcactacaacctccgcctcttgggttcaagtgattctcctgcctcagcctcctgagtagctgggattccaggcacctgc

SEQ ID NO: 23515 - DNA, 201 bp, Homo sapiens
tttatcttaattattgcaaggactggtcaagagaacgtgtttggaaattggaaattaatcatctatgttgaggaaataatttataacatttgagtttctcyggtgaatcattaacatagtttccatatttaaatttctgccattatattttttcacattgtctgtcttctttccaaataacttctcagagaaactcttaga

SEQ ID NO: 23516 - DNA, 201 bp, Homo sapiens
ggcaaattatttatagaagctatgtggaataagctgtatctatttagattttatataatttggtaattagcatacaatagcttacatgaaataaattcttkaaatagtagaaattatgagtaattccactgggcttactcttgtcttagattacatagatataagtattcttgggcattttgatgctagaccaatgattta

SEQ ID NO: 23517 - DNA, 201 bp, Homo sapiens
aaactggaaatgttttcaggaaaggcagtatggcaatttctgtctaaattaaaaatgcatacacccagtagtcccacttctagaaatgtgtccaaaaatasacctgcattcctgaaaaatgactgtattcagaattatatgttgcaaccctgtttgtaaaatcaaaaaggaaagaagaaagaaaatgaaagataaaagaaa

SEQ ID NO: 23518 - DNA, 201 bp, Homo sapiens
gtctaaattaaaaatgcatacacccagtagtcccacttctagaaatgtgtccaaaaatagacctgcattcctgaaaaatgactgtattcagaattatatgwtgcaaccctgtttgtaaaatcaaaaaggaaagaagaaagaaaatgaaagataaaagaaaaaataatccaaatgtctgtcactagcggactagttaaaaaa

SEQ ID NO: 23519 - DNA, 201 bp, Homo sapiens
tgtcaaattgttctctgaagaggttgtatcaactcccccctttaaaatcttctttgacattttacaggtcaagttatcttcctccccaactagctgctcckcctcagtcccccttcattggctccttttgctgtagatgctggagcactgtggggttttactgcctcccaatcactctagtgtcctccactcccaggattt

SEQ ID NO: 23520 - DNA, 201 bp, Homo sapiens
atgtcaaattgttctctgaagaggttgtatcaactcccccctttaaaatcttctttgacattttacaggtcaagttatcttcctccccaactagctgctcmgcctcagtcccccttcattggctccttttgctgtagatgctggagcactgtggggttttactgcctcccaatcactctagtgtcctccactcccaggatt

SEQ ID NO: 23521 - DNA, 201 bp, Homo sapiens
aagaggttgtatcaactcccccctttaaaatcttctttgacattttacaggtcaagttatcttcctccccaactagctgctccgcctcagtcccccttcaktggctccttttgctgtagatgctggagcactgtggggttttactgcctcccaatcactctagtgtcctccactcccaggattttaaatatcgtctagaca

SEQ ID NO: 23522 - DNA, 201 bp, Homo sapiens
ttctttgacattttacaggtcaagttatcttcctccccaactagctgctccgcctcagtcccccttcattggctccttttgctgtagatgctggagcactstggggttttactgcctcccaatcactctagtgtcctccactcccaggattttaaatatcgtctagacacagatggctcccaaatatatatctctacatat

SEQ ID NO: 23523 - DNA, 201 bp, Homo sapiens
cttcctccccaactagctgctccgcctcagtcccccttcattggctccttttgctgtagatgctggagcactgtggggttttactgcctcccaatcactcyagtgtcctccactcccaggattttaaatatcgtctagacacagatggctcccaaatatatatctctacatatttctataatcaaaaaactaatggtacca

SEQ ID NO: 23524 - DNA, 201 bp, Homo sapiens
tccgcctcagtcccccttcattggctccttttgctgtagatgctggagcactgtggggttttactgcctcccaatcactctagtgtcctccactcccaggrttttaaatatcgtctagacacagatggctcccaaatatatatctctacatatttctataatcaaaaaactaatggtaccaaaacaggtactctgatatat

SEQ ID NO: 23525 - DNA, 201 bp, Homo sapiens
agatgctggagcactgtggggttttactgcctcccaatcactctagtgtcctccactcccaggattttaaatatcgtctagacacagatggctcccaaatrtatatctctacatatttctataatcaaaaaactaatggtaccaaaacaggtactctgatatattgcagatgggcctgcaaactggaaatgttttcaggaa

SEQ ID NO: 23526 - DNA, 201 bp, Homo sapiens
tacatatttctataatcaaaaaactaatggtaccaaaacaggtactctgatatattgcagatgggcctgcaaactggaaatgttttcaggaaaggcagtayggcaatttctgtctaaattaaaaatgcatacacccagtagtcccacttctagaaatgtgtccaaaaatagacctgcattcctgaaaaatgactgtattca

SEQ ID NO: 23527 - DNA, 201 bp, Homo sapiens
aatgtgtccaaaaatagacctgcattcctgaaaaatgactgtattcagaattatatgttgcaaccctgtttgtaaaatcaaaaaggaaagaagaaagaaamtgaaagataaaagaaaaaataatccaaatgtctgtcactagcggactagttaaaaaagcattgcaagctgggcacagtagcattcacctgtgaatacact

SEQ ID NO: 23528 - DNA, 201 bp, Homo sapiens
atggcggcaggcacctgtagtcccagctactccggaggctgagacaggagaatggcttgaacccgggacgcggaagttgcggtgagccgagatcacgccaytgcactccagcctgggtgacagagcgagattctgtctccaaaaaataaaaaatattataaaagaataaattcagatacatgctacaacgtgatggacctt

SEQ ID NO: 23529 - DNA, 201 bp, Homo sapiens
gtgctcctggcatgtggtcggtcgaagccaaggacactgctcagcattctgcagtgcacaggacggccccgcccaggcggagaatgatccggtgacacatrtaggtgggaaggatgcacgaatgatggcgtttaggaagaatattatcacttctttcccgtaagagcaacttagagcaagaaaatggtattcttagggcct

SEQ ID NO: 23530 - DNA, 201 bp, Homo sapiens
gtgatttggcctcccaaagtgctgggaatacaggcatgagccaccgcgcccggccagtgccgttgacttgtatgtgcacttacaggtggttaaaatgagamctatcagggtgttgatatctaaaaacctccctgccatcatcttccctacatctctcattcagtgaccatggttgaatgcctgccacctttcaaatattat

SEQ ID NO: 23531 - DNA, 201 bp, Homo sapiens
tagggccttctctcttatggaggctccaagccagggttgccatggcagaagatgctgggcttgctttttccttgagagaactgtactcaagatgatgtaamtgtcaccccgggtgccacttgggtgctttggagaagcgctcagacgcgacacgccgtgacgactccgcggcaggcagccggacctgtcctctggcgtgcg

SEQ ID NO: 23532 - DNA, 201 bp, Homo sapiens
caaagtctgggggatccatagtggtgatggttacacaacactgtaaatgtatttatatttaatgccattgactgttttttgttttttggttttttgagacrgagtctcactctgtcgccgaggctggagtgcagtggcgcgatcttggctcaccgcaacctccgcctcccgggttcaagcgattctcctgcctcagcctcc

SEQ ID NO: 23533 - DNA, 201 bp, Homo sapiens
cccagtaagaaatacctactacacacacacagtctccggtcggcatgcttagggtagtcttccaattccccctcctggtatttacaccctggagtggtccrctcctcttgggctgaacctgtaacttgctcccaagcaagagcacacagcaagctcacgcacgtggttgttggtgtgattctgtttctccagattgtctcc

SEQ ID NO: 23534 - DNA, 201 bp, Homo sapiens
ggagtgcagtggcgcgatcttggctcaccgcaacctccgcctcccgggttcaagcgattctcctgcctcagcctcctgagtagctgggactacaggtgcgygccaccatgcctagttgattttttgtatttttagtagagacggggtttcaccgtgttagccaggatggtctcgatctcctgaccttgtgatttggcctcc

SEQ ID NO: 23535 - DNA, 201 bp, Homo sapiens
taaaaaccacttcctttgctcatttatcaaactcaaacgctaggagggccacctaacatcctccgtcccacgcaatggggtgtttctggagcactccggtktatcagggaccctgtcagttgccatcgcacatgtatatggggccagcccctgtgccaccgaagaggggggatattgaaaacatgttacagccaggagcgg

SEQ ID NO: 23536 - DNA, 201 bp, Homo sapiens
tcctctggcgtgcggttcacgggctgtgtttatccccctggttccttcacagccaccttgggaaatacgttgcctctgaatcacgccaggcaggctctcastgtgtgtgctgcggggctggaaatcagggtgacactccgctaccgaacagcctgactaggaagccagaaagacgctgccggctttagtttgtcctttgac

SEQ ID NO: 23537 - DNA, 201 bp, Homo sapiens
atagtggtgatggttacacaacactgtaaatgtatttatatttaatgccattgactgttttttgttttttggttttttgagacggagtctcactctgtcgmcgaggctggagtgcagtggcgcgatcttggctcaccgcaacctccgcctcccgggttcaagcgattctcctgcctcagcctcctgagtagctgggactac

SEQ ID NO: 23538 - DNA, 201 bp, Homo sapiens
aggcaggcagattgcctgagctcagcagttcaagaccagcctgggcaacacagtaaaacccccaaaaaatacaaaaaaaaaatagccgggcatggcggcasgcacctgtagtcccagctactccggaggctgagacaggagaatggcttgaacccgggacgcggaagttgcggtgagccgagatcacgccactgcactcca

SEQ ID NO: 23539 - DNA, 201 bp, Homo sapiens
ttataaatctttaatacataagctggctttaaaattattggtaaaataagattagaaatgtcttaagaattgttggcgtttttgtttgcacttattgaacragtggtttcatgcttatccctgcagaatactatgagatttgtcataagggttataaaactataaacccggctaggcgtggtggctcacgcctgtaatccc

SEQ ID NO: 23540 - DNA, 201 bp, Homo sapiens
tacaaataattagccaagtgtggtggcatgcacctgtagtcccagatactcaggaggctgaggcaggagaatcacaggtcgaggttgtagtgagctgtgayggcactgcactccagccttggcaacacagtaagacctcgtctctaaaaaagcaaaaagggctgggtgcactggctcacacctataatcccagcactttgg

SEQ ID NO: 23541 - DNA, 201 bp, Homo sapiens
tccggtgacacatgtaggtgggaaggatgcacgaatgatggcgtttaggaagaatattatcacttctttcccgtaagagcaacttagagcaagaaaatggwattcttagggccttctctcttatggaggctccaagccagggttgccatggcagaagatgctgggcttgctttttccttgagagaactgtactcaagatga

SEQ ID NO: 23542 - DNA, 201 bp, Homo sapiens
tgggattacaggcgtgcaccatcacgcctggccactgttatgtagtttttaccacaatttaaaaaaggaaagagtgcctgggtgagtcctacgcacctatwcggagaaccaaaggctttgaggttatcctcggcccacccatctgatgggagtgtttctcaaacttgcttttccgtgatctcccagtaagaaatacctact

SEQ ID NO: 23543 - DNA, 201 bp, Homo sapiens
tatttttagtagagacggggtttcaccgtgttagccaggatggtctcgatctcctgaccttgtgatttggcctcccaaagtgctgggaatacaggcatgasccaccgcgcccggccagtgccgttgacttgtatgtgcacttacaggtggttaaaatgagaactatcagggtgttgatatctaaaaacctccctgccatca

SEQ ID NO: 23544 - DNA, 201 bp, Homo sapiens
tttgtatttttagtagagacggggtttcaccgtgttagccaggatggtctcgatctcctgaccttgtgatttggcctcccaaagtgctgggaatacaggcrtgagccaccgcgcccggccagtgccgttgacttgtatgtgcacttacaggtggttaaaatgagaactatcagggtgttgatatctaaaaacctccctgcc

SEQ ID NO: 23545 - DNA, 201 bp, Homo sapiens
cctctagccatttggtgtggcatcggaaagaaaactaaggccaggtacggtggctcatgcctgtaatcccaacaatttgggaggccatggcggaagggtcmcttgagcccaggagtttgagaccagcctgggcaacatagcaaatgttatgttgccacctctacaaataattagccaagtgtggtggcatgcacctgtagt

SEQ ID NO: 23546 - DNA, 201 bp, Homo sapiens
taacctaaccacaagactaacctactgtcacttctgccctatcctactgctagaagccagtcgctacatctcccccacactcaaagggaggtggtcgcacygtggggtccactggaagttgcctaccagactcaggtcatcccaaacacaccctctagccatttggtgtggcatcggaaagaaaactaaggccaggtacgg

SEQ ID NO: 23547 - DNA, 201 bp, Homo sapiens
acgcacgtggttgttggtgtgattctgtttctccagattgtctccattcctccctggcttctccacagggccgctcaccatggcagccggctccatcaccrccagccagcgagagggcaagacaagagggctgacgagggacgctaccatcacagaggtcagttttgtaacctaaccacaagactaacctactgtcacttc

SEQ ID NO: 23548 - DNA, 201 bp, Homo sapiens
ccgggcatggcggcaggcacctgtagtcccagctactccggaggctgagacaggagaatggcttgaacccgggacgcggaagttgcggtgagccgagatcrcgccactgcactccagcctgggtgacagagcgagattctgtctccaaaaaataaaaaatattataaaagaataaattcagatacatgctacaacgtgatg

SEQ ID NO: 23549 - DNA, 201 bp, Homo sapiens
gttcctgtttggggtttgctggctggaaaaaaaaaaaaaaaaaaaggaaagctggctttctagtaaaaaccacttcctttgctcatttatcaaactcaaaygctaggagggccacctaacatcctccgtcccacgcaatggggtgtttctggagcactccggtgtatcagggaccctgtcagttgccatcgcacatgtata

SEQ ID NO: 23550 - DNA, 201 bp, Homo sapiens
gacctgtcctctggcgtgcggttcacgggctgtgtttatccccctggttccttcacagccaccttgggaaatacgttgcctctgaatcacgccaggcaggvtctcactgtgtgtgctgcggggctggaaatcagggtgacactccgctaccgaacagcctgactaggaagccagaaagacgctgccggctttagtttgtcc

SEQ ID NO: 23551 - DNA, 201 bp, Homo sapiens
ttgagacggagtctcactctgtcgccgaggctggagtgcagtggcgcgatcttggctcaccgcaacctccgcctcccgggttcaagcgattctcctgcctyagcctcctgagtagctgggactacaggtgcgtgccaccatgcctagttgattttttgtatttttagtagagacggggtttcaccgtgttagccaggatgg

SEQ ID NO: 23552 - DNA, 201 bp, Homo sapiens
tgtcgccgaggctggagtgcagtggcgcgatcttggctcaccgcaacctccgcctcccgggttcaagcgattctcctgcctcagcctcctgagtagctggractacaggtgcgtgccaccatgcctagttgattttttgtatttttagtagagacggggtttcaccgtgttagccaggatggtctcgatctcctgaccttg

SEQ ID NO: 23553 - DNA, 201 bp, Homo sapiens
gtagagacggggtttcaccgtgttagccaggatggtctcgatctcctgaccttgtgatttggcctcccaaagtgctgggaatacaggcatgagccaccgckcccggccagtgccgttgacttgtatgtgcacttacaggtggttaaaatgagaactatcagggtgttgatatctaaaaacctccctgccatcatcttccct

SEQ ID NO: 23554 - DNA, 201 bp, Homo sapiens
tggctgatgaccccctcacctctgactccccctccctccctgctttctgaacgcacatccatcaccaaccataggttcctgtttggggtttgctggctggaaaaaaaaaaaaaaaaaaaggaaagctggctttctagtaaaaaccacttcctttgctcatttatcaaactcaaacgctaggagggccacctaacatcctcc

SEQ ID NO: 23555 - DNA, 201 bp, Homo sapiens
caattccccctcctggtatttacaccctggagtggtccgctcctcttgggctgaacctgtaacttgctcccaagcaagagcacacagcaagctcacgcacrtggttgttggtgtgattctgtttctccagattgtctccattcctccctggcttctccacagggccgctcaccatggcagccggctccatcaccgccagcc

SEQ ID NO: 23556 - DNA, 201 bp, Homo sapiens
actgttttttgttttttggttttttgagacggagtctcactctgtcgccgaggctggagtgcagtggcgcgatcttggctcaccgcaacctccgcctcccrggttcaagcgattctcctgcctcagcctcctgagtagctgggactacaggtgcgtgccaccatgcctagttgattttttgtatttttagtagagacgggg

SEQ ID NO: 23557 - DNA, 201 bp, Homo sapiens
ggctgatgaccccctcacctctgactccccctccctccctgctttctgaacgcacatccatcaccaaccataggttcctgtttggggtttgctggctggaaaaaaaaaaaaaaaaaaaggaaagctggctttctagtaaaaaccacttcctttgctcatttatcaaactcaaacgctaggagggccacctaacatcctccg

SEQ ID NO: 23558 - DNA, 201 bp, Homo sapiens
gtggcgcgatcttggctcaccgcaacctccgcctcccgggttcaagcgattctcctgcctcagcctcctgagtagctgggactacaggtgcgtgccaccaygcctagttgattttttgtatttttagtagagacggggtttcaccgtgttagccaggatggtctcgatctcctgaccttgtgatttggcctcccaaagtgc

SEQ ID NO: 23559 - DNA, 201 bp, Homo sapiens
tggagtgcagtggcgcgatcttggctcaccgcaacctccgcctcccgggttcaagcgattctcctgcctcagcctcctgagtagctgggactacaggtgcstgccaccatgcctagttgattttttgtatttttagtagagacggggtttcaccgtgttagccaggatggtctcgatctcctgaccttgtgatttggcctc

SEQ ID NO: 23560 - DNA, 201 bp, Homo sapiens
tgagactgtctcaaaaataaaaataaggccgggcgtggtggcccatgcctgtaatcctagtactttaggaggctgaggcaggcagattgcctgagctcagsagttcaagaccagcctgggcaacacagtaaaacccccaaaaaatacaaaaaaaaaatagccgggcatggcggcaggcacctgtagtcccagctactccgg

SEQ ID NO: 23561 - DNA, 201 bp, Homo sapiens
atgcccaggtcatcagcctgcatttctctgggctctcctccctgcagctggactggtactcctggatccctaatggcccatgcaccatgcagaagcccccrcccatctctaaggatgtgacagagaaggatatagtggacttactgcccaatctccaccaggcacgtatgcaaaagaccttcacaaagttccttggcagac

SEQ ID NO: 23562 - DNA, 201 bp, Homo sapiens
ccagggatggaagacttgaagacccagctggagaaagaactccaggtgctgctgggctttctgcccatccaccatcccagccattacccccacctcccttytcctcccatctccagccccttctctcatctcctccatctacacccaaggtttctcaacgttggcactattaacattctgcaccacataattctctgttgg

SEQ ID NO: 23563 - DNA, 201 bp, Homo sapiens
aagacttgaagacccagctggagaaagaactccaggtgctgctgggctttctgcccatccaccatcccagccattacccccacctcccttctcctcccatytccagccccttctctcatctcctccatctacacccaaggtttctcaacgttggcactattaacattctgcaccacataattctctgttggctggcggggg

SEQ ID NO: 23564 - DNA, 201 bp, Homo sapiens
accaagccatgaaggatgatctagagctgcaggcctggtgcagagagatgactgagactggactgcagagggcccaagaccaggggtgagacatggatccytccccactgaaccctgtcaacacccactcctctgcaaacaatctgcttcttctcacatcatcatgagacaccccacctgcccaaggaagctgagaattct

SEQ ID NO: 23565 - DNA, 201 bp, Homo sapiens
ggcacagagaggcaatgaacggaggggcgggggactgtaggtccagaaggtcctgcattggcccctgagactgagtgtcttcttcccagggaataggtacrtggaggggatggttgggcttttctacaatagtgaccaagccatgaaggatgatctagagctgcaggcctggtgcagagagatgactgagactggactgca

SEQ ID NO: 23566 - DNA, 201 bp, Homo sapiens
agggtgagtaccaggtagaggctgggcacttgcttcctagggcacaaggtgggatgcttccttgatcttcttgcactccattctttccacaggttgaaggrcttggccattaaggggacactggatttcataaattgtgtgaaaaggctggaagatttcaaaaaaatattcccacatggaaagactgtcctggctggtcag

SEQ ID NO: 23567 - DNA, 201 bp, Homo sapiens
catctccagccccttctctcatctcctccatctacacccaaggtttctcaacgttggcactattaacattctgcaccacataattctctgttggctggcggggggggggggggggggctttcctgtggatcgtagggtgtttagtagcattcctggcctctacccattgatgccagcagcatccccccggttgtgacaacc

SEQ ID NO: 23568 - DNA, 201 bp, Homo sapiens
gggcgcctcctgatggtgaagctgcgcaaacacaacgtgctgttgagtctcgactggttctgcaagtggatctcagtgcagggcccggggacccaaggcgmggcctttttcccctgctaccgctgggtgcagggccacggaattatctgcctgcctgagggtactggtgagctcggtggagaaggggcacagcccctggca

SEQ ID NO: 23569 - DNA, 201 bp, Homo sapiens
ccaggtcatcagcctgcatttctctgggctctcctccctgcagctggactggtactcctggatccctaatggcccatgcaccatgcagaagcccccgcccrtctctaaggatgtgacagagaaggatatagtggacttactgcccaatctccaccaggcacgtatgcaaaagaccttcacaaagttccttggcagacgcca

SEQ ID NO: 23570 - DNA, 201 bp, Homo sapiens
gctgcaggcctggtgcagagagatgactgagactggactgcagagggcccaagaccaggggtgagacatggatccttccccactgaaccctgtcaacaccyactcctctgcaaacaatctgcttcttctcacatcatcatgagacaccccacctgcccaaggaagctgagaattctccagagtgtgtccagaaatgctaac

SEQ ID NO: 23571 - DNA, 201 bp, Homo sapiens
ggcctggtgcagagagatgactgagactggactgcagagggcccaagaccaggggtgagacatggatccttccccactgaaccctgtcaacacccactccyctgcaaacaatctgcttcttctcacatcatcatgagacaccccacctgcccaaggaagctgagaattctccagagtgtgtccagaaatgctaacaagcac

SEQ ID NO: 23572 - DNA, 201 bp, Homo sapiens
attcctcgaggataaggatttagactttaatgtctccctagcaaaagggtgagtaccaggtagaggctgggcacttgcttcctagggcacaaggtgggatkcttccttgatcttcttgcactccattctttccacaggttgaaggacttggccattaaggggacactggatttcataaattgtgtgaaaaggctggaagat

SEQ ID NO: 23573 - DNA, 201 bp, Homo sapiens
catcccacaagggctcctgggatggagaagtgggggatcaaatgcccaggtcatcagcctgcatttctctgggctctcctccctgcagctggactggtacycctggatccctaatggcccatgcaccatgcagaagcccccgcccatctctaaggatgtgacagagaaggatatagtggacttactgcccaatctccacca

SEQ ID NO: 23574 - DNA, 201 bp, Homo sapiens
ttgagtctcgactggttctgcaagtggatctcagtgcagggcccggggacccaaggcgaggcctttttcccctgctaccgctgggtgcagggccacggaaytatctgcctgcctgagggtactggtgagctcggtggagaaggggcacagcccctggcaggctggaggaagaagcgggtggggggaggctactgtaaaaga

SEQ ID NO: 23575 - DNA, 201 bp, Homo sapiens
accagctgctcctcctcacctccacctctccccggctgtgctgtggaggggaaacggagccaggattctctgaaggttcaccgaccccgccgtcctccctraagaccccaaaacctgagctgtgtactgtcgcgcaggaggcagagtttgagatcgacgtccccctgcacctggggcgcctcctgatggtgaagctgcgca

SEQ ID NO: 23576 - DNA, 201 bp, Homo sapiens
agctggcagaagaggggatacgtgaagaatgcagtggccttatgtggtggaaaaccagaaacttcgctgcagggagctccaagtctgaaggaagacatcastcatgaaaactttgcattcagttttttggttctgcagaaagtgattggtgtttaaagtaaaaaagacttgggtgggtagaggaaggatccaccctggaaa

SEQ ID NO: 23577 - DNA, 201 bp, Homo sapiens
tggctaaagctggcagaagaggggatacgtgaagaatgcagtggccttatgtggtggaaaaccagaaacttcgctgcagggagctccaagtctgaaggaaracatcagtcatgaaaactttgcattcagttttttggttctgcagaaagtgattggtgtttaaagtaaaaaagacttgggtgggtagaggaaggatccacc

SEQ ID NO: 23578 - DNA, 201 bp, Homo sapiens
ttgatgccagcagcatccccccggttgtgacaaccaaaaatgtgtctagatagtgctgaatgtcctggggttggggagaggaggaattgcccctgattgaraacattgatctacaacatctcctcctgtatcttcttttctttctccacattcctctcttccttcttcattgaacatatatcagccttagggaaaagcgca

SEQ ID NO: 23579 - DNA, 201 bp, Homo sapiens
gtagcattcctggcctctacccattgatgccagcagcatccccccggttgtgacaaccaaaaatgtgtctagatagtgctgaatgtcctggggttggggaraggaggaattgcccctgattgagaacattgatctacaacatctcctcctgtatcttcttttctttctccacattcctctcttccttcttcattgaacata

SEQ ID NO: 23580 - DNA, 201 bp, Homo sapiens
tctgcactaagagcttcctctggaactagatacaaaacttctcttaggtattttccctcactcttccctcccctctccccatagctcaaggttcatcccamgtgcattaacctttgagcacacacaaggtgggagtcctagggtgtgcaggccagaaccacagaaaagttcttttctgtatctccacatagctttccctgc

SEQ ID NO: 23581 - DNA, 201 bp, Homo sapiens
aggggatggttgggcttttctacaatagtgaccaagccatgaaggatgatctagagctgcaggcctggtgcagagagatgactgagactggactgcagagrgcccaagaccaggggtgagacatggatccttccccactgaaccctgtcaacacccactcctctgcaaacaatctgcttcttctcacatcatcatgagaca

SEQ ID NO: 23582 - DNA, 201 bp, Homo sapiens
ccaaggtttctcaacgttggcactattaacattctgcaccacataattctctgttggctggcggggggggggggggggggctttcctgtggatcgtagggkgtttagtagcattcctggcctctacccattgatgccagcagcatccccccggttgtgacaaccaaaaatgtgtctagatagtgctgaatgtcctggggtt

SEQ ID NO: 23583 - DNA, 201 bp, Homo sapiens
ccatctccagccccttctctcatctcctccatctacacccaaggtttctcaacgttggcactattaacattctgcaccacataattctctgttggctggcggggggggggggggggggctttcctgtggatcgtagggtgtttagtagcattcctggcctctacccattgatgccagcagcatccccccggttgtgacaac

SEQ ID NO: 23584 - DNA, 201 bp, Homo sapiens
gggctttctgcccatccaccatcccagccattacccccacctcccttctcctcccatctccagccccttctctcatctcctccatctacacccaaggtttytcaacgttggcactattaacattctgcaccacataattctctgttggctggcggggggggggggggggggctttcctgtggatcgtagggtgtttagtag

SEQ ID NO: 23585 - DNA, 201 bp, Homo sapiens
gaggtgttcttcaaggctcccagcctgcctggtgctgcctccagggatggaagacttgaagacccagctggagaaagaactccaggtgctgctgggctttytgcccatccaccatcccagccattacccccacctcccttctcctcccatctccagccccttctctcatctcctccatctacacccaaggtttctcaacgt

SEQ ID NO: 23586 - DNA, 201 bp, Homo sapiens
cttttaaagctgatttctccccggatctccgggcaagatgggcaagtacacggtccgcgtagccaccggggatttgctcctggcgggctctcccaacctgstgcagctatggctggtgggcgagcacggggaggcagacctagggaagcagctgccaccggtgtggggaaaggtgagcgcggactgcggtgagagctgggg

SEQ ID NO: 23587 - DNA, 201 bp, Homo sapiens
ggctcagctctgccactttgtcaccatgtgcatcttcacatgcacaggtcagcatgcttctaaccacctgggccaggtaacctatgtgatcatcccacaasggctcctgggatggagaagtgggggatcaaatgcccaggtcatcagcctgcatttctctgggctctcctccctgcagctggactggtactcctggatccc

SEQ ID NO: 23588 - DNA, 201 bp, Homo sapiens
caattgatgttcctagagcgggtttatgattcttggaagaatgatgccttctttgggtaccagtttctcaatggtgcaaaccccatgctcctgaggtgttyttcaaggctcccagcctgcctggtgctgcctccagggatggaagacttgaagacccagctggagaaagaactccaggtgctgctgggctttctgcccatc

SEQ ID NO: 23589 - DNA, 201 bp, Homo sapiens
catctccttagagtcccgggctcagctctgccactttgtcaccatgtgcatcttcacatgcacaggtcagcatgcttctaaccacctgggccaggtaaccyatgtgatcatcccacaagggctcctgggatggagaagtgggggatcaaatgcccaggtcatcagcctgcatttctctgggctctcctccctgcagctgga

SEQ ID NO: 23590 - DNA, 201 bp, Homo sapiens
gtcctggggttggggagaggaggaattgcccctgattgagaacattgatctacaacatctcctcctgtatcttcttttctttctccacattcctctcttcyttcttcattgaacatatatcagccttagggaaaagcgcaagcttctggagagaaatagcaagaaaaactaaacaaagccttggagagctaaaagctgaat

SEQ ID NO: 23591 - DNA, 201 bp, Homo sapiens
gtgcattaacctttgagcacacacaaggtgggagtcctagggtgtgcaggccagaaccacagaaaagttcttttctgtatctccacatagctttccctgcstgagacctatttcgtgttctggtttcgagatctctgattctcatttcaccaggattctcatttcaccaggttcctcatctccttagagtcccgggctcag

SEQ ID NO: 23592 - DNA, 201 bp, Homo sapiens
gagactgagtgtcttcttcccagggaataggtacgtggaggggatggttgggcttttctacaatagtgaccaagccatgaaggatgatctagagctgcagrcctggtgcagagagatgactgagactggactgcagagggcccaagaccaggggtgagacatggatccttccccactgaaccctgtcaacacccactcctc

SEQ ID NO: 23593 - DNA, 201 bp, Homo sapiens
gttctctagggtttgtagagaatttgaccgagatataactctagggtgaaccaacatttacagactgagagaagggagcagagtgagaaaagaaacaagaraaggaacctcattgaggtaggaggaaaatcaaaaagtgcaatccatggcagccaggaaaagaaagcgtttcaagagggacgcgtgattatctgtctcaag

SEQ ID NO: 23594 - DNA, 201 bp, Homo sapiens
gctctcctccctgcagctggactggtactcctggatccctaatggcccatgcaccatgcagaagcccccgcccatctctaaggatgtgacagagaaggatmtagtggacttactgcccaatctccaccaggcacgtatgcaaaagaccttcacaaagttccttggcagacgccagcctgtcatggtgagaagcaaatgcct

SEQ ID NO: 23595 - DNA, 201 bp, Homo sapiens
aagaccttcacaaagttccttggcagacgccagcctgtcatggtgagaagcaaatgcctgggtcctgggaaggaggcagctcaaaggaggggaagtattcygggctgagagtcccaaggggctgagccaacttgtcttctgcctctcagcatgaggagaaatatttctctggtcctgagccccaagctgtgctgagacaat

SEQ ID NO: 23596 - DNA, 201 bp, Homo sapiens
acaacctcccaaaaccaatatacagacttccaacccagggatttgaaaaaggagggggatggaggattagatcagtgggattaggagttcggagctcagarctcacagggtgctccccaattgatgttcctagagcgggtttatgattcttggaagaatgatgccttctttgggtaccagtttctcaatggtgcaaacccc

SEQ ID NO: 23597 - DNA, 201 bp, Homo sapiens
gaccctcaggcatctcctttcccttcctgccttcctctcccttctcctctgctgcagcatgattttcttaatcttcagacactcactattttcatgaacarttaccctccggccccacaaccaaagacaactcatggcctcctttggcccttgtgtaacactgcaaacctgtggctttgcaaaatgtacccaggtcacaag

SEQ ID NO: 23598 - DNA, 201 bp, Homo sapiens
gattttcttaatcttcagacactcactattttcatgaacagttaccctccggccccacaaccaaagacaactcatggcctcctttggcccttgtgtaacaytgcaaacctgtggctttgcaaaatgtacccaggtcacaaggggatttttttttttagcaatgatatccctttctgggtcactttttaagcttataaccag

SEQ ID NO: 23599 - DNA, 201 bp, Homo sapiens
tattttcatgaacagttaccctccggccccacaaccaaagacaactcatggcctcctttggcccttgtgtaacactgcaaacctgtggctttgcaaaatgyacccaggtcacaaggggatttttttttttagcaatgatatccctttctgggtcactttttaagcttataaccagacttataatcttaaatgtatttttcc

SEQ ID NO: 23600 - DNA, 201 bp, Homo sapiens
caacattctagaaagatatagctaagaatgttgcttctacaattagaaaataaagtatcagactatattaaaaattaatagtacttcgttactactaaacragctagtacttcgttttcattggatacattttcagcatcatgagttgtcacagcctctgagcccctgatcttaagccacaagggctgagtgtattgtaaa

SEQ ID NO: 23601 - DNA, 201 bp, Homo sapiens
attcttgcatgttgctgtctgggaatagaccacactacagctggtagttctgggggcggtactgccgaaaggcctgaacacatgtattttggctgcaattraggaacttgggatgctgactattaattttgtatttcagcaactgccccttctcctatcccaaagaaccaattactgccctctgcctcagcagtaccagta

SEQ ID NO: 23602 - DNA, 201 bp, Homo sapiens
tattttctcttagaatggtttacattatgatgggggatggggagctgggggagggctgtacattcccaaaagaaagtagtgttataggaaatccaaatgcrcttcagtgattcactcctgaaaagcagcctgggtatgttggcagattttgtttgcatttgtcttgcgtatttaaagtctcaggaaatctagtcttggtcc

SEQ ID NO: 23603 - DNA, 201 bp, Homo sapiens
tcaaactcctgggctcaagtggtcctcctgcttcagcttcccaagtagctgggactacaggcatgtgccaccacccccagccaaaacatccatattttctmttagaatggtttacattatgatgggggatggggagctgggggagggctgtacattcccaaaagaaagtagtgttataggaaatccaaatgcacttcagtg

SEQ ID NO: 23604 - DNA, 201 bp, Homo sapiens
cacactgcaatcacatggcattaaaaaatatattgtgtatggaacttggcgaggtcagtcaggacctggagctgtaatcatagccttattgccacttcttkcgttgtgtatacattgaatggctcatagattttaagagatttttttattgtaagtatttctactaaatgcacttatccttctatatgtttatatattttg

SEQ ID NO: 23605 - DNA, 201 bp, Homo sapiens
caaatttactttttattaaggatgtacctgtgcactattctaaagctaagcatttaaggataaagtccagaaataaaatgtccatattttcttttcttttytttttttttttttttttctgtcatctgtcacccagactggactgcagtggtgccatcatgtcttactgcagcctcaaactcctgggctcaagtggtcctc

SEQ ID NO: 23606 - DNA, 201 bp, Homo sapiens
atatgttgtagccccatcattacactgagatatttccatttgagtaactaaaggtactcctgacagagctggagatgaggggcattttggtgggcagtggycactagggttcacgtcacctacttaatgcaaagaccttagtggtctcagaatgaaaaggtaaaatggaagagaaaagcacagtcctttcctgtcttttca

SEQ ID NO: 23607 - DNA, 201 bp, Homo sapiens
agattgttcaaaaagtttcaaatgacattccttactctttggttttcagaggcattcaagcaaaatatcacagtggtcttttgttttctgaccaatctaamaatacctgtgattaaatttaatttgttagtgtaaataaatttcttgccaatgagtattattgttgttagacaacgaatgcaataaaaagaaatactgagg

SEQ ID NO: 23608 - DNA, 201 bp, Homo sapiens
tattcccagacctactggaatcttcttgccatccgcctggccttcgtcattgtgtttgaggtagccgaggcacctgctggttctcccatccatggcatgasgccccgaccctgtgctttgcctaattcgagcacgtggtgaggggtcggtgccgtcacttcctgctgtgtcatcttggtcaaatcagagctcttctctgca

SEQ ID NO: 23609 - DNA, 201 bp, Homo sapiens
ccaccagttaaaggtattgtcagagtatcctgtttgggaagaattcccatttcaggcaccctcgatgaagagccaggccaggaacatgggatgagagagcraaatggtggaaaaaggggagataggctaattccagaggcacctgcccagccaacactcagccctggctgcgcgcactgagtcctgtgtctgctgcaggta

SEQ ID NO: 23610 - DNA, 201 bp, Homo sapiens
ctcccatccatggcatgaggccccgaccctgtgctttgcctaattcgagcacgtggtgaggggtcggtgccgtcacttcctgctgtgtcatcttggtcaartcagagctcttctctgcacctgcgttttccctgcctggcctcatccctgggttgtggtgtggacattgtgggtgtctccacaggagccccagggccacga

SEQ ID NO: 23611 - DNA, 201 bp, Homo sapiens
gtggaattttccacttgtgtcataatgtgggctctcaaaaagtttcagattttggagcattttggatttcaaattttcagatcagaaatgctcaacctgtrttagacactggaagccttagaaaattctccttactgtaagccccagtttactacctaataactaccacctagttatatcttctgtgcaacaaatatggtc

SEQ ID NO: 23612 - DNA, 201 bp, Homo sapiens
agatggagctctacataagaaattacagattagtccagatttccttccagtttaaaagcattgtctttctgacagtaaaaccagagaaaggacatttcaargaatgactcaaagaattagtaatgaacctcaaacagttcatctttccttgttattatgaccttgcaaatgtgtttatattttcaagaccggtagctaagt

SEQ ID NO: 23613 - DNA, 201 bp, Homo sapiens
gtaaggctctgggtgataggaggtgggagagtgggtggaggagagaaggaacaacttagagtagaaaacaagtaggctcagatgagctgagagttatttgrcagtgaaaagagtattcctcgtagagaagttgctgtttggggactgggacttgaaaactgctaataggtttttaaaactttcaatgtgaaataagcagtc

SEQ ID NO: 23614 - DNA, 201 bp, Homo sapiens
tctaacagcaaaggaagtattgatatattcccttccaaatcacaggctttacacaatacaactaggagaagaaagccaaactaaaattcaaatgtactaartttttttcctatctctgggtgactttgggcaaatcattgaatctttcaacctcagatttattataagtaaaataaagtaacacctctcttaacctacctt

SEQ ID NO: 23615 - DNA, 201 bp, Homo sapiens
aatcactagtttcttgtattcataaactcagagatacagagggcttggtttgaagttggggtgagatgaaacctttgctctgagccaaagctctggggccytgcattccctgcattgggttgatgactgtcagcatcactgccgcaggccatgcttgactaaggtacctggttttagccacagccacctccttgtatgtta

SEQ ID NO: 23616 - DNA, 201 bp, Homo sapiens
gccttgtggaacaaggtaagctttctctttgcctacgagcctccctttagctcagacagagtttctgttcctacagctatgatcacttagacatatctcarataggcatgatagttaacccaaggggacttctgatctgagcattgtttgagcaaaggcctatctccaaataggagcttttccatcttaagaaccattatt

SEQ ID NO: 23617 - DNA, 201 bp, Homo sapiens
tgtctttctgacagtaaaaccagagaaaggacatttcaaggaatgactcaaagaattagtaatgaacctcaaacagttcatctttccttgttattatgacyttgcaaatgtgtttatattttcaagaccggtagctaagttctatgaatttacaaggtgcaaaataggactttgttttctttgctccccaaatgcctcctt

SEQ ID NO: 23618 - DNA, 201 bp, Homo sapiens
aagactgttgcaccagagtattctgatgcctttgctcttgtttgctcccacacagcacaagttgaccccggaatatctggagctcaaaaagtaccaggccrttgcttctaacagtaagatctattttggcagcaacatccctaacatgttcgtggactcctcatgtgctttgaaatattcagatattaggactggaagaga

SEQ ID NO: 23619 - DNA, 201 bp, Homo sapiens
cctctcctgcgatagtcctgggtgctccactgattggaggatagagccagctgtctgacacacaaatggtcttttcagccacagtcttatcaagtatcctrtatgtattcctttctaaactgctactcatgaatgaggaaagtctgatgctaagatactgcctgcactggaatgttaaacactaaatatataacaagctgt

SEQ ID NO: 23620 - DNA, 201 bp, Homo sapiens; identical to SEQ ID NO: 12068

SEQ ID NO: 23621 - DNA, 201 bp, Homo sapiens
aacccaaaatcccagaagccataagaagaaattttgagttaatgtgagtaatatgcatgggatcccaatatttctgtttagggctgtctgcatattaataytccagtctagaggaaacatgtgagacaatacactctggggtggagtatgtgtcttatcttctttactcttactctagtaatattgcctattcttgtgtct

SEQ ID NO: 23622 - DNA, 201 bp, Homo sapiens
ctactaaaaatacaaaaaattagccaggcatggtggtgggcgcctgtagtcccagctactcgggaggctgaggcaggagaatggcgtgaactcaggaggcraagcttgcagtgagtcgagatagtgccactgcactccagcctgggtgacagagtgagactccatctcaaaaaaaaaaaaaaaaaaagattgcttctggtg

SEQ ID NO: 23623 - DNA, 201 bp, Homo sapiens
acagggagaatggatagggtttataggcagcttgagtctgtggatagcattttcatttgtacagattaagaatagggaagttttttgaccaaagtttcagrttgtagtatgcatccttgttgttgacatgcacttagttttacctggataggtagtgccgtttatgaaagcatggcaggattgtttacagttcatttcaga

SEQ ID NO: 23624 - DNA, 201 bp, Homo sapiens
ttacagttcatttcagattacagtggcttcccttatactccaggtcactgtgtattagattgccctctttggccctcggttgatgctgaaagtttaatacrtctttaattaaataattcaattatagaggaatgtacagagaacaatataatgaaagcttaagattttgccttattcccttcagatctttttttttttttt

SEQ ID NO: 23625 - DNA, 201 bp, Homo sapiens
tttttaatttcttttttctagtactgtaatttgtttttgttatagtttacaatttattggttcctcataaattgaaatacacacacaaaaaggtaaggtayttttccacaggtggtttgagaagcactgctctagaatagctatctcaaagtagaattgatgggtcatagggtagcatgtcttcacattcaacatattgac

SEQ ID NO: 23626 - DNA, 201 bp, Homo sapiens
ttttctagtactgtaatttgtttttgttatagtttacaatttattggttcctcataaattgaaatacacacacaaaaaggtaaggtatttttccacaggtrgtttgagaagcactgctctagaatagctatctcaaagtagaattgatgggtcatagggtagcatgtcttcacattcaacatattgacaaattgctctctc

SEQ ID NO: 23627 - DNA, 201 bp, Homo sapiens
gtgttatttaatcttgtaatcttatgtctaggcttcctgctaagtgagagtttaattataaattcttaaatcccctaggttttcttcctgtccccttttasatggcttagggaaagaattgtgtctactgaagtgaaatgtattcttcccctaatcagactgatttccatatgttgttccatatttattttacccattctt

SEQ ID NO: 23628 - DNA, 201 bp, Homo sapiens
aggaagctcaccgagcaggggcggcccactggcctccgggggcggaggagttggcaaggggtcagcgggctcagccagaagggaagaatgaggggacaggkgtactggactccccggctcagcctgcgagagagcgccaagtttccggagggagagggtagaaactggagggggtggacctgtcactcacgggactgaggg

SEQ ID NO: 23629 - DNA, 201 bp, Homo sapiens
ttcaatttctagccccattgaacatagtagtttagtttttggatggtgtaatatagattgattttacattggtggagaaagagggaattatctcctggagyagttcgtaaagcatactgttttatggaaagaaaaaaatcacttggaagttttctttccattatgtactttttctaggggtcagagataagatgtcctaaa

SEQ ID NO: 23630 - DNA, 201 bp, Homo sapiens
cctatctccaaataggagcttttccatcttaagaaccattattgttcttatggtattattggaaaaaactggagttttagagcaagtagacctaactgtgyattagcactgctgcatctgctttattgactattttttaaagactttattttttacagcagttttaggttcatagtgaaattgaccaaaaagtacagacag

SEQ ID NO: 23631 - DNA, 201 bp, Homo sapiens
tccagcttttgggtttgtttgtgactgtgggtagctcagctttccttttcttccttaaattggggcttattagctaccactttattttcaggcagacaagrtatgaaaattacccataatcaatagtaaagaatatacaagataataaaccccatctctggccgggcgccgtggctcacgcctgtaatcccagcactttgg

SEQ ID NO: 23632 - DNA, 201 bp, Homo sapiens
ttgggtcactgtgttttccagattgtgggttgtaaaatcaactttagtgagtcatgaacagcattttaaataaaatggaatagaataggaaaagaaatggyatgtaataagtttaaatattctgtgacacttgtgtttcacagtgtggcggggtaggtgtttatattggacgtcagtgcaaaatgtgtttcttactgtgtc

SEQ ID NO: 23633 - DNA, 201 bp, Homo sapiens
gagatggagtcttgttctgtcacccaggctggagtgcagtggcatgatctcagctcagtgcaacctctgccttttgggttcatgcaattctcctgcctcascctccctagtagctgggactacaggtgtatgcctccacaccaggctaatttttgtatttttagtagagacagtgtttcaccatgttggccaggctggtct

SEQ ID NO: 23634 - DNA, 201 bp, Homo sapiens
ctagactcttactagtgttctctttatgtatggacatttcaggagcagtttcagtggctaaagatgcagtttgctgtaaaactattgctggaagcttaagsagctataattttatatgaatagtaccttgaattaaatatttaatagaggaaagagtcctgaagccgttagggttgaagagagtgctcatattttgtttct

SEQ ID NO: 23635 - DNA, 201 bp, Homo sapiens
tgttttattcagcaattatttgagatgctatggtgatttatagaatacctttctcaatttgactttagatctctgccaaaataaaatactcttgtagcttrctatgggtgacatttgtgaactcctagagggaactgataagctgaggctcttacaaggaagtaaaattcatatttctgccatgtatgaagcattaagata

SEQ ID NO: 23636 - DNA, 201 bp, Homo sapiens
ctgtattagacactggaagccttagaaaattctccttactgtaagccccagtttactacctaataactaccacctagttatatcttctgtgcaacaaatayggtcactgcacatgggtgcccacctgaggagggcaggggctgaaacccagcttcattctgcatgtcaaaccatgcacctgcaggactgtagaaacggctg

SEQ ID NO: 23637 - DNA, 201 bp, Homo sapiens
agacattgacatctatagagggacagaaatgctatgaaaaaggaagcgaactctttctgtgttttaagtgaatattagtatgtttcattatcagcttctcyccaggtctatctataactgtgttttatggattgcctttagtagttcacactttttttctttgtttttagtggtggggtcatgatctatattgaccgaata

SEQ ID NO: 23638 - DNA, 201 bp, Homo sapiens
cccaaattatttctagggtataatcactgcattgaattgtatcaaaagaagaatgtgaagttcaaggtattttttaaattacttattttaaatgactattwcaagtgtaaaaaagacattgacatctatagagggacagaaatgctatgaaaaaggaagcgaactctttctgtgttttaagtgaatattagtatgtttcat

SEQ ID NO: 23639 - DNA, 201 bp, Homo sapiens
tgaggcaggagaatggcgtgaactcaggaggcgaagcttgcagtgagtcgagatagtgccactgcactccagcctgggtgacagagtgagactccatctcaaaaaaaaaaaaaaaaaaagattgcttctggtgacggaaaaatgaatattgtgtgttttctgctctcaaataaatcatagtattcagactgtcatttgatg

SEQ ID NO: 23640 - DNA, 201 bp, Homo sapiens
ggaaacatggaagattataaattttcttctaaggattgctttagctatgtttcacaggttttgaaatgtactttgtatattggtgttcagttttaattctwaaccttttccttctaatttcttctttggctcatgaattattaaaagtatatgcttcaatttctggtttagtgggttttgaggggctacctttttattgtt

SEQ ID NO: 23641 - DNA, 201 bp, Homo sapiens
atccattatttcctttaagattacttccagaaggtcttccttggtttaacttatgtcactcattctttctttctcctgccacattaattgtcctgtgttgccatgcatttatgttgctctgtttttgttctgtggtactttcataaagtatctttttttcccattagcttgtggaccgttgctacagagttgcatgaagga

SEQ ID NO: 23642 - DNA, 201 bp, Homo sapiens
ccccgtctctactaaaaatacaaaaaattagccgggcgtggtggcgggcgcctgtagtcccagctacttgggaggctgaggcaggagaatggcgtgaaccygggaggcggagcttgcagtgagccgagatcccgccactgcactccagcctgggcgacagagcgagactccgtctcaaaaaataaaaaaaaaattaaaaat

SEQ ID NO: 23643 - DNA, 201 bp, Homo sapiens
cgggaggcggagcttgcagtgagccgagatcccgccactgcactccagcctgggcgacagagcgagactccgtctcaaaaaataaaaaaaaaattaaaaawaaataaaccccatcacgaccagtttcttttccacctgtccaaaaaaaaaacaaaattaattggggggaaaaacagttttcatggagggcctcacactact

SEQ ID NO: 23644 - DNA, 201 bp, Homo sapiens
tgcctgcactggaatgttaaacactaaatatataacaagctgtgttttcctaagctgagatctgttgaataatgtttacattcgtcccccggggaaatgtmtgctcagccaccattcaagagatgactgagaaggagatggtaagttcaagaagactgattgcacctgggacccaggccctttctttgggatccagtccca

SEQ ID NO: 23645 - DNA, 201 bp, Homo sapiens
atcagactgatttccatatgttgttccatatttattttacccattctttccttagttcatgccatcacttctttatctgccatctcactctccattccttytctcctgtctaaatcttgccaggcttttaaaggctcatcccagattcttcctcttctgatctatagctcttaaagtctatattgtaaattttggcccttt

SEQ ID NO: 23646 - DNA, 201 bp, Homo sapiens
ctagagagatcccaaactccccagccagcattcagggccctctgtctagtattaccatggtctcttgtcagaatttcatctttcatccaaattgtcccttstgctccaggcaagcctatctactttcgttcgcctatacacatgttgtcttcaactgtgtgtatttcagtaggatatttattgagcttaagatgttcctct

SEQ ID NO: 23647 - DNA, 201 bp, Homo sapiens
caagtagacctaactgtgtattagcactgctgcatctgctttattgactattttttaaagactttattttttacagcagttttaggttcatagtgaaattsaccaaaaagtacagacagtttttatatacctctttccccaacacattcctttattgacactttaaagcttagtttcctcctttataaaggcagtaaaatc

SEQ ID NO: 23648 - DNA, 201 bp, Homo sapiens
cactggaagccttagaaaattctccttactgtaagccccagtttactacctaataactaccacctagttatatcttctgtgcaacaaatatggtcactgcrcatgggtgcccacctgaggagggcaggggctgaaacccagcttcattctgcatgtcaaaccatgcacctgcaggactgtagaaacggctggtgccgtttt

SEQ ID NO: 23649 - DNA, 201 bp, Homo sapiens
agtagacctaactgtgtattagcactgctgcatctgctttattgactattttttaaagactttattttttacagcagttttaggttcatagtgaaattgascaaaaagtacagacagtttttatatacctctttccccaacacattcctttattgacactttaaagcttagtttcctcctttataaaggcagtaaaatcta

SEQ ID NO: 23650 - DNA, 201 bp, Homo sapiens
ctttctgtgttttaagtgaatattagtatgtttcattatcagcttctccccaggtctatctataactgtgttttatggattgcctttagtagttcacactytttttctttgtttttagtggtggggtcatgatctatattgaccgaatagaagtggttaatatgttggctccttatgcaggtatgttacccatctacctgt

SEQ ID NO: 23651 - DNA, 201 bp, Homo sapiens
acatagtgagatgttgatgttcttagctcggtcttgaagtcacttgttatatattgctgcttcctgtctgtctctgttgactgattctggatgaaatttgkgggggggctggagacaatgcagtaaatagagcttttatgtctggacttattttacttgaagcttagtacctgggtggaatgtaaggctctgggtgatagg

SEQ ID NO: 23652 - DNA, 201 bp, Homo sapiens
aagtctaataagttacccagtaaaaaagcttatccatagttaagtaatacatttagtgggtaaacttattggataaacagactatctgcttgtcatcttcrttccttaatttctttattagataattccttgcaatttttttcccacacaaaagggaagaaaaggcagtttaagctctgtaaaagaatagtactgtggaaa

SEQ ID NO: 23653 - DNA, 201 bp, Homo sapiens
ttgggaggctgaggtgggaggatgacttgaacacagcaggttgaggctgcagtgaactgtgttcatgctgtactcttgtctgggcaacagagcaaaacccwgtctataaataaataaataaatagcatttgtatatagagaacttgtttttgaaccttaccctttgagaggggtagaattcgtttttaaaaataaactttt

SEQ ID NO: 23654 - DNA, 201 bp, Homo sapiens
  misc_feature (1)...(201): n = A,T,C or G, or insertion/deletion polymorphism (see Tables 1-2)
attttaagtcaggaacgcagctgttaatgtgatagccactctccaaagtgagagagggtcattggcagttattcagacttgactcatgatactcaggagancaataggtgaaatgtatatagggagagagaagactgttgcaccagagtattctgatgcctttgctcttgtttgctcccacacagcacaagttgaccccgg

SEQ ID NO: 23655 - DNA, 201 bp, Homo sapiens
tcttcaaattttttctttgtcatttaactttgttttttccttgctgataactttgaagtgttcatgttttacatagtaatttcagtgattttgtctttatrgtgtgttgctgagctggcatgttttaagagcttttcaccaccttaaaagtatagcaattaaaattagaaattataaaaattgtatctgcttttacagttg

SEQ ID NO: 23656 - DNA, 201 bp, Homo sapiens
taatggtaacttaacagtagatcctgagtatagtaaaactaagctccttagcctgtcactcaagacagaggtctcctagccctctttctcttcttattttwtgttgtcttcgcttgttggctggttccatatcacctctccattgtgacttgttcatttgtgccttcttgtctttcttttttttgtttttgtttttgtttt

SEQ ID NO: 23657 - DNA, 201 bp, Homo sapiens
ctcaagccaatctagaagtgtaggaggcatctttgacaatcgcctcaccctcagcatctaatcagtccctatgtcctgcagattccaccaccaaaatccaygtattaataaaactgaccacacctccatcttcactgtcatctcaagccaagctaccaactctaaccttgacatgtgcagtagcagtagccgcctgtcttc

SEQ ID NO: 23658 - DNA, 201 bp, Homo sapiens
tggaggagagaaggaacaacttagagtagaaaacaagtaggctcagatgagctgagagttatttgacagtgaaaagagtattcctcgtagagaagttgctstttggggactgggacttgaaaactgctaataggtttttaaaactttcaatgtgaaataagcagtcacaatattaagcagtggggaaagggactcttaact

SEQ ID NO: 23659 - DNA, 201 bp, Homo sapiens
tttagtagagatgaggtttcactgtgttaaccaggatggtctcgagctcctgaccttgtgatccgctcgccttggcctcccaaagtgctgggattacaggygtaagccaccgcacctggccatagcatgctaaatattatacataaaccagtaacatagttgtttattatcattatcaaatattgtatactgtacataact

SEQ ID NO: 23660 - DNA, 201 bp, Homo sapiens
cgttattggctggagggcgctgacgtctgattgttgcgcggtcgcatttttccggggaacgcggattcgcattcccaattttaggtggcagtcgcaacccrtactattcggacagatggcacagaaaccgctgcgcctgtgagtgaccgtgaatggaagcctctctccctgtgtctctttcgtgtgtgtaggtgacgacac

SEQ ID NO: 23661 - DNA, 201 bp, Homo sapiens
acaaggatgtggaggaattggaatcctcacacattgctggtgagagtgtaaaatggtgcagccgctttggaaaactgtttagcagttcttgaaaggttaartgtaagagtcagcagcatggtaacggcaattttattcctgtcccaagataagggaaaacatatgtccacacaaaaacttgtacacagatgatcataatag

SEQ ID NO: 23662 - DNA, 201 bp, Homo sapiens
ctgagccacctgtttggcttccactgcttctgtgaactccttcccgaaggtcagatgtgtcaaggacacgtcatccaggatgagcccaaaggtggctgctygctctgtaaggtcgttgctcatctgcctggagaccagctctctttaggtgattagttctccagcatcaaagtgagccaccactgacttgaggatctcagt

SEQ ID NO: 23663 - DNA, 201 bp, Homo sapiens
cacctgtttggcttccactgcttctgtgaactccttcccgaaggtcagatgtgtcaaggacacgtcatccaggatgagcccaaaggtggctgcttgctctrtaaggtcgttgctcatctgcctggagaccagctctctttaggtgattagttctccagcatcaaagtgagccaccactgacttgaggatctcagtagtgat

SEQ ID NO: 23664 - DNA, 201 bp, Homo sapiens
ttatactttcgtcaaaaggtgtgcacattataaaatttggcaagcattgttaaattcatctaaaaactttgttccaatttatacccctaccccagcagtgkttttttttttccccctccatatttctcactggatcaagtcaaagtttttgtttgtttgtttaagatggagtctctgtctattgcccaggctggagtgtag

SEQ ID NO: 23665 - DNA, 201 bp, Homo sapiens
gtggctgaggcaggagaatcgcttgaacccgggaggcggaggttgctgtgagccgagatcgcgccactgcactccagcctgggcgacagaacgagactctcaaaacaaaacaaaacaaaacaaaacaaacaaaaaacaatacaaataatggccgggcgcggtggctcacgcctgtaatcctagcactttgggaggctgagg

SEQ ID NO: 23666 - DNA, 201 bp, Homo sapiens
ctccatgttggtcgggctggtctctatctcctgacctcaggtgattcgcccgcctcagcctcccaaagtgctgggattgcaggcatgagccgccacccccrgcccacgtcaaagttttattaaagtttttgccaatgtgataaatgatatataattgttacttagttgcatttccctaatcagtagtaagtttaaacatct

SEQ ID NO: 23667 - DNA, 201 bp, Homo sapiens
tggctgaggcaggagaatcgcttgaacccgggaggcggaggttgctgtgagccgagatcgcgccactgcactccagcctgggcgacagaacgagactctcaaaacaaaacaaaacaaaacaaaacaaacaaaaaacaatacaaataatggccgggcgcggtggctcacgcctgtaatcctagcactttgggaggctgaggc

SEQ ID NO: 23668 - DNA, 201 bp, Homo sapiens
ggctgaggcaggagaatcgcttgaacccgggaggcggaggttgctgtgagccgagatcgcgccactgcactccagcctgggcgacagaacgagactctcaaaacaaaacaaaacaaaacaaaacaaacaaaaaacaatacaaataatggccgggcgcggtggctcacgcctgtaatcctagcactttgggaggctgaggcg

SEQ ID NO: 23669 - DNA, 201 bp, Homo sapiens
cccctaatgtcattatgttctttttctctaaagtatctttacgcgttcagtattgttcccatgaagctaatggatgcagcagaactggtaaaacagcctcyggatgtcactgaaaacccttacagaaaatctgggcaggaagcatccataggaaagcaaattcttgcccctgtggtatgttctgattgagggttggcattt

SEQ ID NO: 23670 - DNA, 201 bp, Homo sapiens
ttagtcgagacggggtttcaccatattggccaggctggtctcgaactcctgaccttgtgatctgcctgccttggcctcccgaaggtattacaggcatgagycacccacgcctggcaagatctggtttttgacatgttgagcctaaggtttttgacatgttgagctatcaaggcattccaaaaatgttattaaataggcaat

SEQ ID NO: 23671 - DNA, 201 bp, Homo sapiens
tatagtttagtacataagacaagtttaatcgttagaatctaaatcttttttttccccttgggaaatcatgatgatgtttagaaaatcttagtagatttcarctaagcttagtgttttttattgtagtttggggttaacagtttgatacattaggtctttctttgtccaaactggattcagacgtttggggttacagtttta

SEQ ID NO: 23672 - DNA, 201 bp, Homo sapiens
tgaggagcacaggctcagcccattgtggcagtgttgtataccagtcttttcaggatataaaaatcagacaaagctgagttctgtggggtgattatatgctstagtgcttggaccatagtaacacctggctttcttttacatgaagctcagcctccaggaccctgctggttttgccttgctagccctgaagtggaaaaacat

SEQ ID NO: 23673 - DNA, 201 bp, Homo sapiens
ctgttggaaatcccagagcactctgacatcaagcaggtgaaacaggggatggtgatattcagggaagagtaaatatctgttttttttgttgttgtttgttstttgtttgtttgtttgagacagagtcttgctctgttgcctaggttggagtgcagtggcatgatcttggctcactgcaacctccgccttccgggttcaagt

SEQ ID NO: 23674 - DNA, 201 bp, Homo sapiens
tgagacaaagtctcgctctgtcacccaagcaggattgcagtggcataactgtggctcactgtagcctcaacctcctgggctctagagttcctcccacctcrgcctcatgagtagctgggaccacaggcgcatgctaccatgcctggcaaacttttttgattttttatagagacaggagggtctccctgtgttgcccaggct

SEQ ID NO: 23675 - DNA, 201 bp, Homo sapiens
ctgcactccagcctgggcgacagaacgagactctcaaaacaaaacaaaacaaaacaaaacaaacaaaaaacaatacaaataatggccgggcgcggtggctsacgcctgtaatcctagcactttgggaggctgaggcgggcggatcacttgcggtcaggagttcgagaccagcctggccaacgtggtgacaccccgtctcta

SEQ ID NO: 23676 - DNA, 201 bp, Homo sapiens
gctgaggcaggagaatcgcttgaacccgggaggcggaggttgctgtgagccgagatcgcgccactgcactccagcctgggcgacagaacgagactctcaaaacaaaacaaaacaaaacaaaacaaacaaaaaacaatacaaataatggccgggcgcggtggctcacgcctgtaatcctagcactttgggaggctgaggcgg

SEQ ID NO: 23677 - DNA, 201 bp, Homo sapiens
ctgaggcaggagaatcgcttgaacccgggaggcggaggttgctgtgagccgagatcgcgccactgcactccagcctgggcgacagaacgagactctcaaaacaaaacaaaacaaaacaaaacaaacaaaaaacaatacaaataatggccgggcgcggtggctcacgcctgtaatcctagcactttgggaggctgaggcggg

SEQ ID NO: 23678 - DNA, 201 bp, Homo sapiens
gcacaaggatatagcaaagctagggaagatcgagagaagggctgctaaagtgatgaaggaagagagaaagacacatatgatgctctgtaaggaaggatgakaaaatgaggcccctttgttttgcggggagctaaaaattgattttgatcaaggcttataaataaccatacagtatatttatggaggagaaaagtatagttc

SEQ ID NO: 23679 - DNA, 201 bp, Homo sapiens
taatcctagcactttgggaggctgaggcgggcggatcacttgcggtcaggagttcgagaccagcctggccaacgtggtgacaccccgtctctactaatacaaaaaaaaaaaattagccaggcgtggtggcgcgtgcctgtaatcccagctacttgggaggctgaggcaggagaatcgcttgaacccggaggcggaggttgc

SEQ ID NO: 23680 - DNA, 201 bp, Homo sapiens
gggttatgttctgagaaatgagttggtaggcgatttcgtcattgtgcgaacatctttgagtgtacttccagagacctagatggtatggcttcctgtacacytaggctaaatggtatagctgtacgtcaagttactgtactgaatactgtaggcaattgtaacacaatggtaagcatttttgtatttaaatatagaaagggt

SEQ ID NO: 23681 - DNA, 201 bp, Homo sapiens
gaagcaggtggaccacctgagcctggggaggtcgatgctgcagtgagctgtgatcgtgctgctgatctccaggctgggtgacagattgaaaccctgtctcaaaaaaaaaaaaaaaaaattgcaatagtggtaacttttgggaagaaaatattcgtgaatctgggagagtgcataagaggggtatttggcttaatgatagga

SEQ ID NO: 23682 - DNA, 201 bp, Homo sapiens
tgtacgtcaagttactgtactgaatactgtaggcaattgtaacacaatggtaagcatttttgtatttaaatatagaaagggtacagtgaaaacacctggcygggtgtggtggcttatgcctgtaatcccaacactttgggaggccgaggtgggtggatcacctgaggtcagaagttcaagaccagcctggccaacatggtg

SEQ ID NO: 23683 - DNA, 201 bp, Homo sapiens
aagcaggtggaccacctgagcctggggaggtcgatgctgcagtgagctgtgatcgtgctgctgatctccaggctgggtgacagattgaaaccctgtctcaaaaaaaaaaaaaaaaaattgcaatagtggtaacttttgggaagaaaatattcgtgaatctgggagagtgcataagaggggtatttggcttaatgataggag

SEQ ID NO: 23684 - DNA, 201 bp, Homo sapiens
ttcagtagtaataacatgcatgaagctgtcatctcctatgataacagtgccctctggaatacttcctgaaggacctgcctgaggcttttttacagtcaactttttttttttttttttgaatacgtaggagtgtactctaaacagtaaagagcataccatactgaatatatttttttttttttgagatggagtcttgctctg

SEQ ID NO: 23685 - DNA, 201 bp, Homo sapiens
tctaaaggttagttgaataacatttaatcttctgcttttggccattccaggaagaatcagcctgtcagtttttctttgatttaaatgaaaagcagggaagraagcgttcatccacaggtagagatagcaaatcttctcctcatccaaagcagcctcgcaaacctcgtaagtacctttattccagaggtttcttctatgaac

SEQ ID NO: 23686 - DNA, 201 bp, Homo sapiens
tctcctatgataacagtgccctctggaatacttcctgaaggacctgcctgaggcttttttacagtcaactttttttttttttttttgaatacgtaggagtrtactctaaacagtaaagagcataccatactgaatatatttttttttttttgagatggagtcttgctctgttgcccaggctggagtgcagtgccgcgatct

SEQ ID NO: 23687 - DNA, 201 bp, Homo sapiens
tttatagcttcagattcagaaactagagccttatgaaatttttttttttttttttttgagatggagtctcgctctgttgcccaggttggagtgcaatggcrtgatctcagttcactgcaacctctgcctcccgggttcaagtgattctcctgcctaagcttcccaagtagctgggattacaggcacctgccatcacatctg

SEQ ID NO: 23688 - DNA, 201 bp, Homo sapiens
aggacctgcctgaggcttttttacagtcaactttttttttttttttttgaatacgtaggagtgtactctaaacagtaaagagcataccatactgaatatatttttttttttttgagatggagtcttgctctgttgcccaggctggagtgcagtgccgcgatctcagctcactgcaagctctgcctcgtgggttcatgctat

SEQ ID NO: 23689 - DNA, 201 bp, Homo sapiens
tctgcccgcctcagcctcccaaagtgctgggattacaggcgtgagccaccacccccggcctatgaatttttatctggaattatgtaatgctggaagctgaktcacactaactgatcacatcaaagataaaatttcagttttgcttagtagtggagggtgtagcttactaatgacaggaatacccatattcacactcctggt

SEQ ID NO: 23690 - DNA, 201 bp, Homo sapiens
gggtgaggtggggtggagtggagtggaggttgcagtgagccaaggtcgtgccactgcactttagcctgggtgacagagtgagaccctgtctcagaaaaagaaaaaaaaaaagtttggcgaggtgtacaataaaagcacgccagaaagagacactcacaaaacaataaaattttaatatttcaagatgagttaaaagacatt

SEQ ID NO: 23691 - DNA, 201 bp, Homo sapiens
tggtaggtgtccagtacctgtttatcaaatgaatgactgaagccctgtactaagataggaggagtcgtactaagataggaggagtcaaaataagaaggatagaatgaatgtgaaagatgtttggaaaaagggattgatgggacttggtgactggatgggggatttttgacttttgttgaccatgtcagccatagacatgtc

SEQ ID NO: 23692 - DNA, 201 bp, Homo sapiens
aatgtgtgtgtctcatgggaaagtcattctatttcacatttccccagatacttttgcttgggtagggctggattagacattaaataataccagtgtttgastctgatttccctgggttttctgtagaccattgttctttttcattcatttagaatgaagaaaacttaatttttaacactatagtcaccagtgactagaatt

SEQ ID NO: 23693 - DNA, 201 bp, Homo sapiens
atttaagtgagcaagaagagaataccccccttaccataatcccacagcctaatgcagaatcataggtaatacaggtttttctgttaaatctccatatactyattctagaagaatgtcttgttctctaaaaatatactgcgaaaacagaagttttgggaacaagccactcaaaacttacacagttcttaagaatcggaatac

SEQ ID NO: 23694 - DNA, 201 bp, Homo sapiens
atggactaagacaattccttaagtgtgtagtgcttctgaagacaggtgccttcatccatttctcattgatttgttctacttttggtttctggggttgatcstttcaacttatcctaacaatctgaggaccgttttttgtgtcttccttcctgtagactgactagagtctcaatttcatcttacactttaaggagttacact

SEQ ID NO: 23695 - DNA, 201 bp, Homo sapiens
ttctcatctaggcctgaaactagaggggaaaaaggtcttgtttgtggcccaacccaacatcccaagtaggccacatgagtatttcagcctagagtctacaytgtccttaggtagaaacctcttacaaacctgtaatgacctttgggtgtctgtggaagagtttgggatctcctccctgcaattattctttttgattgcctt

SEQ ID NO: 23696 - DNA, 201 bp, Homo sapiens
aactattcacaaaaattgcaagtacaggattagagatggtgcagaggagctctttagtttagacatcattacctaaagaatgcacatcataatagagaagytgatgtttatggcagtgaccttctgacaaaaatagctagacgactcaggcttctagagtaaccttttaaacaaatacaatataaagtggttattatacaa

SEQ ID NO: 23697 - DNA, 201 bp, Homo sapiens
gtggatcacctgaggtgaggagtttgagaccagcctggccaacatggtgaaaccccgtctttactaaagctacaaaaattagctgggcgtggtgccaggcrcttgtaatcccagctactcaggaggctgaggcaggagaattgcttgagcctgggaggtggaggttgcagtgagccaagatcgctccattgcactccagcc

SEQ ID NO: 23698 - DNA, 201 bp, Homo sapiens
tcttgaactcctgacctcgcgatccatttgccttggcctcccaaagtgctgggattacagtcatgagccaacgcacccggtctggataattgttttctaamgtatctatatttgcctgtactggtactcattgggcccttctgtgctcactcatggcatcttcccatcagagaatatctgagtggtagaccattcttgcat

SEQ ID NO: 23699 - DNA, 201 bp, Homo sapiens
gaggagtttgagaccagcctggccaacatggtgaaaccccgtctttactaaagctacaaaaattagctgggcgtggtgccaggcacttgtaatcccagctrctcaggaggctgaggcaggagaattgcttgagcctgggaggtggaggttgcagtgagccaagatcgctccattgcactccagcctgggtgacagtgaaac

SEQ ID NO: 23700 - DNA, 201 bp, Homo sapiens
ctggctcgccgcttccggaaagactttgagccctatgactttactctggatgactaaaacaaagggaagaactttttatgaactccacaggaagtagtaargcttttttttttttttaattaaaagaattttttttgagacaaagtctcgctctgtcacccaagcaggattgcagtggcataactgtggctcactgtagcc

SEQ ID NO: 23701 - DNA, 201 bp, Homo sapiens
cttttctgcctctttggatgcatctgagtttgaggttttactttccttctaccccattaggttgtatgtttgcttttgttttgtagaatttagtcagcagsttaaggcttaggaacattagatgctaatcatgccatcttagctttttttgtgagcccaaggagtatattcgggggtgggggtgggaatgaaagttactgg

SEQ ID NO: 23702 - DNA, 201 bp, Homo sapiens
ggattagtttatgctatttttctctcccacacaatttgtatagtaagttaggctttgaattgccttctgtttgggaagcttcaataggttcaagatcacaygcaggagataagagatttggaatgtgtgacatagctcagtgctgctctaggcctcagtgagaagtgacttttcttttccattcatctttctattgtccag

SEQ ID NO: 23703 - DNA, 201 bp, Homo sapiens
aggagtgtactctaaacagtaaagagcataccatactgaatatatttttttttttttgagatggagtcttgctctgttgcccaggctggagtgcagtgccrcgatctcagctcactgcaagctctgcctcgtgggttcatgctattctcccgcctcagcctcctgagtagctgggactacaggcgcccgccaccacgcccg

SEQ ID NO: 23704 - DNA, 201 bp, Homo sapiens
acatcactaggcgataggaattttttagttccattataatcttatgggaccaccattacatatgtggtcccttgttgaccgaaacattgttatgtggcacrtaactgtattcttgtctttaacctaaaaaggttattgaaatgcttaagaacgctttggcatgatcaaattttcattttggaaagcagttctgtctgcaat

SEQ ID NO: 23705 - DNA, 201 bp, Homo sapiens
catttttatatgtgttcttttcctagttatagtttagtacataagacaagtttaatcgttagaatctaaatcttttttttccccttgggaaatcatgatgrtgtttagaaaatcttagtagatttcagctaagcttagtgttttttattgtagtttggggttaacagtttgatacattaggtctttctttgtccaaactgg

SEQ ID NO: 23706 - DNA, 201 bp, Homo sapiens
ggtaggtgtccagtacctgtttatcaaatgaatgactgaagccctgtactaagataggaggagtcgtactaagataggaggagtcaaaataagaaggatagaatgaatgtgaaagatgtttggaaaaagggattgatgggacttggtgactggatgggggatttttgacttttgttgaccatgtcagccatagacatgtcc

SEQ ID NO: 23707 - DNA, 201 bp, Homo sapiens
tttctgtgaaatcttcacagtaaaataggttgattacagttgggtaaatagtatttcccctaatgtcattatgttctttttctctaaagtatctttacgcrttcagtattgttcccatgaagctaatggatgcagcagaactggtaaaacagcctccggatgtcactgaaaacccttacagaaaatctgggcaggaagcat

SEQ ID NO: 23708 - DNA, 201 bp, Homo sapiens
gtaggtgtccagtacctgtttatcaaatgaatgactgaagccctgtactaagataggaggagtcgtactaagataggaggagtcaaaataagaaggatagaatgaatgtgaaagatgtttggaaaaagggattgatgggacttggtgactggatgggggatttttgacttttgttgaccatgtcagccatagacatgtcca

SEQ ID NO: 23709 - DNA, 201 bp, Homo sapiens
ggattgcagtggcataactgtggctcactgtagcctcaacctcctgggctctagagttcctcccacctcagcctcatgagtagctgggaccacaggcgcawgctaccatgcctggcaaacttttttgattttttatagagacaggagggtctccctgtgttgcccaggctggtctgtaatgcctaggctcaagggatcctc

SEQ ID NO: 23710 - DNA, 201 bp, Homo sapiens
aggtgtccagtacctgtttatcaaatgaatgactgaagccctgtactaagataggaggagtcgtactaagataggaggagtcaaaataagaaggatagaatgaatgtgaaagatgtttggaaaaagggattgatgggacttggtgactggatgggggatttttgacttttgttgaccatgtcagccatagacatgtccaca

SEQ ID NO: 23711 - DNA, 201 bp, Homo sapiens
ggcatgtggatcacctgaggtcaggggttcaagaccagcctggccaacatggtgaaaccgtgtgtctactaaaaatataaaaattagcagggcatggtggygcatgcctgtaatcccagctcctcgggagactgaggcaggagaattgcttgaacctgggaggcggagattgcagtgagccgagattgcaccactgcactt

SEQ ID NO: 23712 - DNA, 201 bp, Homo sapiens; identical to SEQ ID NO: 12112

SEQ ID NO: 23713 - DNA, 201 bp, Homo sapiens
gcagggcatggtggcgcatgcctgtaatcccagctcctcgggagactgaggcaggagaattgcttgaacctgggaggcggagattgcagtgagccgagatygcaccactgcacttcaccctgggcgacagagcaaggctctgtctcaaaaaaaaaaaaataaaataaataaaatagccaagctacaaggttgggtgtagta

SEQ ID NO: 23714 - DNA, 201 bp, Homo sapiens
ataatgtatatgttaattagcttgatttagccatcccacagtatatacacatttcaaaacagcatgttgtatacaataaaaaatacaaattttagttatcaattaaaaataaatgagagggaaaatttaaaaaatttttttttgtcttttttttttttttgagacggagtctcgctctgtcacctggctggagtgcagtgg

SEQ ID NO: 23715 - DNA, 201 bp, Homo sapiens
cacctcccgggttcaagtgattctcctgcctcagcctcctgagtagcttggattacaggcgtgtgtgaccatacccggctaattttttttatatttttagyagagacagggtttcaccgtgttagtcaggatcatctcgatctccttacctcgtgatccgcccacctcggcctcccagagtgctgggattacaggcgtgag

SEQ ID NO: 23716 - DNA, 201 bp, Homo sapiens
taatgtatatgttaattagcttgatttagccatcccacagtatatacacatttcaaaacagcatgttgtatacaataaaaaatacaaattttagttatcaattaaaaataaatgagagggaaaatttaaaaaatttttttttgtcttttttttttttttgagacggagtctcgctctgtcacctggctggagtgcagtggc

SEQ ID NO: 23717 - DNA, 201 bp, Homo sapiens
aggtttcaccatattggtcagcctagtctggaacttctgacctcaggcggtccacctgcctcggcctctcaaagttttgggattacaagcgtgagccactrtcccagccgaaagtggtcattttgaaatcagaagttgtatctttttgtggttgagggtgataaaaactgaaaaactgttttcaagtttggagcatgggag

SEQ ID NO: 23718 - DNA, 201 bp, Homo sapiens
tttactatatgaatttagtgccaggaaaggaaagagcagctaaggtacttgggttatttctgtgaaatagattttttggatccagtaggaggatcaagcartgaacttggtagtgaacatgtgatagtgagcttgaaatactggtaggacatccaacatatagttggaagtgagagttattattattattttttgagatgg

SEQ ID NO: 23719 - DNA, 201 bp, Homo sapiens
aatgtatatgttaattagcttgatttagccatcccacagtatatacacatttcaaaacagcatgttgtatacaataaaaaatacaaattttagttatcaattaaaaataaatgagagggaaaatttaaaaaatttttttttgtcttttttttttttttgagacggagtctcgctctgtcacctggctggagtgcagtggca

SEQ ID NO: 23720 - DNA, 201 bp, Homo sapiens
gttgctacaatctctaaaatcagattttttcaagaaagaatttttattaataacctcaagtacttttcgcctacaccctcaggctcactttttgtataggyttttctccctggagaatcctacatgctgtattgatgtctcaattctgtgtgctgcttcttcagtgctaccttgccctggccaaaggaggcttatctgatg

SEQ ID NO: 23721 - DNA, 201 bp, Homo sapiens
atagtcttggctcactgcaacctctgcctcccggattcaagcgattcttctgcctcagcctcctgagtagctggggttacgggtgtgtgccaccatgcccrgctaattttgtattttttagtagagacagggtttcaccatgttggtcaggctggtctcgaaatcctgacctgaggtgatccagctgcctcagcctcccaa

SEQ ID NO: 23722 - DNA, 201 bp, Homo sapiens
atgtatatgttaattagcttgatttagccatcccacagtatatacacatttcaaaacagcatgttgtatacaataaaaaatacaaattttagttatcaattaaaaataaatgagagggaaaatttaaaaaatttttttttgtcttttttttttttttgagacggagtctcgctctgtcacctggctggagtgcagtggcat

SEQ ID NO: 23723 - DNA, 201 bp, Homo sapiens
gggcaacagagtgagactccgtctcaaaaaaaaaaaaaaaaaaaaaaaaggccaatagacatataaaaagatgctcttatcattagccattatggtaatgyaaatcaaaagcacaatgatacaccacttcatacccactaggatggcagtagtcaaaaaggcaaatacataataacaagtgttgacaaggatgtggaggaa

SEQ ID NO: 23724 - DNA, 201 bp, Homo sapiens
ccgccttccgggttcaagtgattctcctgcctcagcctccccagtagctgggactacaggcatgcgccaccatacctggctactttttgtatttttagtcragacggggtttcaccatattggccaggctggtctcgaactcctgaccttgtgatctgcctgccttggcctcccgaaggtattacaggcatgagccaccca

SEQ ID NO: 23725 - DNA, 201 bp, Homo sapiens
ccaggcgtggtggcagacgcccgtagtcccagctacttaggaggctgaggcaggagaatggcatgaacctgggaggcggagcttgcagtgagccgagatcrcgccactgtactccaccctaggcgacagagcgagactccgtctcaaaaaaaataaaataagaatggcctgacttcgaggctgttctgaggcgcttcctgt

SEQ ID NO: 23726 - DNA, 201 bp, Homo sapiens
gctactcaggaggctgagagtcaggaggatcacttaagcctaggagtttgaggatgcagtgaggtatgattgcaccactgtacttcagcctgggcaacatygcaagaccctgtctctaaaaaaaaaaaaaaaaaaaagaggcagtggacaatttggaactagagcactgggtattgactagactggagatgaacagggcat

SEQ ID NO: 23727 - DNA, 201 bp, Homo sapiens
taaagaattgtatattgaaatctgcaaattgattaagaattaaaaactgatttgaaactattaaataactagttgaatattactatcaattatgtactgtwtgatattttaaaatctcatatatctgtttaaaaaactcattttagctgctgttgtgtgtaggaaatttctttggctccacccaagatgctgaatgggagg

SEQ ID NO: 23728 - DNA, 201 bp, Homo sapiens
ccgtagtcccagctacttaggaggctgaggcaggagaatggcatgaacctgggaggcggagcttgcagtgagccgagatcgcgccactgtactccaccctrggcgacagagcgagactccgtctcaaaaaaaataaaataagaatggcctgacttcgaggctgttctgaggcgcttcctgtactatggaaaaagcaccttt

SEQ ID NO: 23729 - DNA, 201 bp, Homo sapiens
tgctatgaacagagtggtgggctacatgggacaattgataaaaagctaaattgtaaacagtccttgccccagaggacccatggtcttagggcagatgtttwcatatatgacagtaatgtaatgtagaatgtgaagagtaccatgacagagttttggagaacaatgtgctgtagaaattcagaaaagggacagctcatttct

SEQ ID NO: 23730 - DNA, 201 bp, Homo sapiens
aaatgaggctctagagcagtgcccggtagacttttcacaacgatggaaatgctcaaatatctgcactgtccaatacagttgtgactagccacttgtggccmctgagtgctgaaatgtggctaatgtgactgaggaactaaatttttgattttatttaattaattagaatttaaatttaaatagccatacctggctaatggt

SEQ ID NO: 23731 - DNA, 201 bp, Homo sapiens
gaaatgtggctaatgtgactgaggaactaaatttttgattttatttaattaattagaatttaaatttaaatagccatacctggctaatggttaccccactrgatagcaggctgtagagagcttaggtagcttgtcctagtcacacagtggtaggttcaaacccaggcctgttggacctcaaaacttgaggtcttaacctca

SEQ ID NO: 23732 - DNA, 201 bp, Homo sapiens
acctgaggtgaggagtttgagaccagcctggccaacatggtgaaaccccgtctttactaaagctacaaaaattagctgggcgtggtgccaggcacttgtartcccagctactcaggaggctgaggcaggagaattgcttgagcctgggaggtggaggttgcagtgagccaagatcgctccattgcactccagcctgggtga

SEQ ID NO: 23733 - DNA, 201 bp, Homo sapiens
caaaaccatagagggagtaacataacttaagcaaagattgaagatgggaagttgctggcaagaagatacagtttgaaggggagtggaaaatgtgtagaacrgagtatctgatgctggtgtctgtgatttgcagctgttttttctcccctagttaaaaatgggctttgagtgagccttgaacctgtcttggactaattcaga

SEQ ID NO: 23734 - DNA, 201 bp, Homo sapiens
aggtgaggagtttgagaccagcctggccaacatggtgaaaccccgtctttactaaagctacaaaaattagctgggcgtggtgccaggcacttgtaatcccrgctactcaggaggctgaggcaggagaattgcttgagcctgggaggtggaggttgcagtgagccaagatcgctccattgcactccagcctgggtgacagtg

SEQ ID NO: 23735 - DNA, 201 bp, Homo sapiens
gtgtgtgagtgtgtctgtatgtagttattctttagtcctaagagccaagatagttgttttgttgacattgggcttgtgctgctgttacgtgggcctgagtyccctagaaggagaggcagaggaattttaaatcagagtgggtatgactaggctcctgactctgcaaactcatgtctagttgaggtgacaaaactacagttt

SEQ ID NO: 23736 - DNA, 201 bp, Homo sapiens
ctaaaaaggcagtcttctgttgcttatatacctgtattgggttaaaaatgttgatattctttttatagcttcagattcagaaactagagccttatgaaatttttttttttttttttttgagatggagtctcgctctgttgcccaggttggagtgcaatggcgtgatctcagttcactgcaacctctgcctcccgggttcaa

SEQ ID NO: 23737 - DNA, 201 bp, Homo sapiens
gactttcttattatagatgagaagtgattccttccttcagccttaactttgagcccaccacactaagagcatagttggaataattttttattttttttccygagacagtcttgttctgtcgcccaggctggagtgcagtggcacgatctcggctcactgtaacctccgccttccaggttcaagcaattcacctgcttcagt

SEQ ID NO: 23738 - DNA, 201 bp, Homo sapiens
cttagctactcaggaggctgagagtcaggaggatcacttaagcctaggagtttgaggatgcagtgaggtatgattgcaccactgtacttcagcctgggcarcatcgcaagaccctgtctctaaaaaaaaaaaaaaaaaaaagaggcagtggacaatttggaactagagcactgggtattgactagactggagatgaacagg

SEQ ID NO: 23739 - DNA, 201 bp, Homo sapiens
attttttgtattttagtagggatggggtttcactatgtgcatcttttctagactgtagcttccttagaactgtatttttcttcgcattgccttttcctgtstccagatgtctgcatttaagtccatgtagaatcttctctagaacgcagaaagccttttccctaatcttctcttcccaactttttccagtaatatttgtaa

SEQ ID NO: 23740 - DNA, 201 bp, Homo sapiens
ttcccaccagcagtgtatgaaggtttctgcttttccacatccctgtcaacatttgttatagcaatagccagttttacaagatagctctcttttcctctctyataaataggtatggttctctaggggtgatgcttttatatacttcttggactctctgtattttttagcccgtctaattgagagtgatgagttccttttgct

SEQ ID NO: 23741 - DNA, 201 bp, Homo sapiens
agctgctggagagtttacacttcagacatgtaaaatggcagggacataggagagtcatgggagattcatccccctattgatggcttttcattctgcaattytgactaaaatttgttcatttttctttgaacccaggtcgtaaaggtatcttcactggaagctcggggctgcagattgtgtacctcagtgggacagaatcct

SEQ ID NO: 23742 - DNA, 201 bp, Homo sapiens
gtttgggttgtttctactttatggctattagaaataatgctcccataaaatatctgcatgcaagtctttgtgtggatatagacctaggaatggtctatatkttggatagacctaggaatggatttgctaggttatatagtaaatttatgtttaacttttaagaaactgctaaactgttttccaaaatgactgcaccatctt

SEQ ID NO: 23743 - DNA, 201 bp, Homo sapiens
cactggtggaagtaagcctaaggaagattttgaaaaggttatgtgtgagggcagaaaacactgggtgagcttcattgaagggaaatgtaagaatgcatttsggaacaaatctccatggttggattcaggattatcagtgatgatccagaagtggagcctgtataccaccccttgccagtttcagcaccatgtgtccatgac

SEQ ID NO: 23744 - DNA, 201 bp, Homo sapiens
acaggcgtgagccaccatacctggccagattttaatattttatgagtaatcttgaaaaggatggtacaccaggagtgacaactatcatggggagtgaaacrctacactggtggaagtaagcctaaggaagattttgaaaaggttatgtgtgagggcagaaaacactgggtgagcttcattgaagggaaatgtaagaatgca

SEQ ID NO: 23745 - DNA, 201 bp, Homo sapiens
gtttttactgaatttaattttacctttgtagtcacacataaaaataaagtttgcactcctttaagtcttgattgaacacataccatttttgttaaattgarttcccttcatgagcataggaacttagtagctgctgagtggctgggggagggagacctatttactgtttactattgatctttatattttttgaatttgaat

SEQ ID NO: 23746 - DNA, 201 bp, Homo sapiens
aattttttaccacaaataaatatgagataatgtatatgttaattagcttgatttagccatcccacagtatatacacatttcaaaacagcatgttgtatacmataaaaaatacaaattttagttatcaattaaaaataaatgagagggaaaatttaaaaaatttttttttgtcttttttttttttttgagacggagtctcgc

SEQ ID NO: 23747 - DNA, 201 bp, Homo sapiens
atgggttcataaaataatagaatgatcaaactcgaaggaaggactttaagagtgtttcattgagattctctttcttcatctttttgtttcacacaagaagstgaccttgggagggtaaattttccagggtcatggctaatggcatagctggggctttaattggggctcctgacacccagttcagtgttcttttgttgtagc

SEQ ID NO: 23748 - DNA, 201 bp, Homo sapiens
tgatattttattcaatagagttcaagcaattcagaagaaaagtggaaactttgatgtaagatgtttgtttttactgaatttaattttacctttgtagtcayacataaaaataaagtttgcactcctttaagtcttgattgaacacataccatttttgttaaattgagttcccttcatgagcataggaacttagtagctgct

SEQ ID NO: 23749 - DNA, 201 bp, Homo sapiens
cctggccaacatggtgaaaccccgtctttactaaagctacaaaaattagctgggcgtggtgccaggcacttgtaatcccagctactcaggaggctgaggcrggagaattgcttgagcctgggaggtggaggttgcagtgagccaagatcgctccattgcactccagcctgggtgacagtgaaactccatctcaaaaataaa

SEQ ID NO: 23750 - DNA, 201 bp, Homo sapiens
tgagaccctcagtggatctgcccagtggtttacgtgcactgaaccttgcaaggtaactgcagagagactagatcatgtatctatctaatccaaaagaccartatataccaaacccggcaggcccatttgtttcctgaattgctataatgtttatctctttgtttgcagcttggcttgtggagatgttgaaggaaagtttga

SEQ ID NO: 23751 - DNA, 201 bp, Homo sapiens
gctctgtcgcccaggctggagtgcaatggcatgatctcggctcactgcaacctccgtctcccaggttcatgccattctcctgcctcagcctcctgagtagytgggactacaggcgaccgccaccacacctggctaattctttgtatttttagtagagacagggtttcaccgtgttagccaggatggtctcgatctcctgat

SEQ ID NO: 23752 - DNA, 201 bp, Homo sapiens; identical to SEQ ID NO: 12126

SEQ ID NO: 23753 - DNA, 201 bp, Homo sapiens
cactgcaacctccgtctcccaggttcatgccattctcctgcctcagcctcctgagtagctgggactacaggcgaccgccaccacacctggctaattctttrtatttttagtagagacagggtttcaccgtgttagccaggatggtctcgatctcctgatatagaggtcaagttcttaaagaatatactgccaagaaaacca

SEQ ID NO: 23754 - DNA, 201 bp, Homo sapiens
agttttagtcccaaggatgtgtcttctctgagaatgatgctgtgtacaacctcccagtttaagggtgttgatatcttgctcacatccccatggcccaagtrtgtggggaactttgggaattcttctgtgagtagtgtttgtttagttggaatttctaaaagcaaattgcactggcttgagttgggacttttttcttttcct

SEQ ID NO: 23755 - DNA, 201 bp, Homo sapiens
cctggctactttttgtatttttagtcgagacggggtttcaccatattggccaggctggtctcgaactcctgaccttgtgatctgcctgccttggcctcccraaggtattacaggcatgagccacccacgcctggcaagatctggtttttgacatgttgagcctaaggtttttgacatgttgagctatcaaggcattccaaa

SEQ ID NO: 23756 - DNA, 201 bp, Homo sapiens
gccaccatacctggctactttttgtatttttagtcgagacggggtttcaccatattggccaggctggtctcgaactcctgaccttgtgatctgcctgcctyggcctcccgaaggtattacaggcatgagccacccacgcctggcaagatctggtttttgacatgttgagcctaaggtttttgacatgttgagctatcaagg

SEQ ID NO: 23757 - DNA, 201 bp, Homo sapiens
cattctacaggaaaatgcacagcatgccacccggtttatagctctggcaaatgttggaaatccagaaaagaaaaaggtaaagatttacctatttggtggarggttgatattcatggtctgcctgataaatgtatctcttgtccagtttagcattcagatcttctcttctccctgactgcaaggtctcagcagtttcggaga

SEQ ID NO: 23758 - DNA, 201 bp, Homo sapiens
tgtatttttagtcgagacggggtttcaccatattggccaggctggtctcgaactcctgaccttgtgatctgcctgccttggcctcccgaaggtattacagkcatgagccacccacgcctggcaagatctggtttttgacatgttgagcctaaggtttttgacatgttgagctatcaaggcattccaaaaatgttattaaat

SEQ ID NO: 23759 - DNA, 201 bp, Homo sapiens
ccttacagacaggctgacacaggcttgtctggcctgaggatattctgtgctgaggggtgtttctccacccctgtgatggatttgctacttctcagagactrtgcaggcacaacttctctgggacctgcacaaggaatttctcctgtctccccaacccccaggtcattcctgtcccaatcagctgctctactactgatgaca

SEQ ID NO: 23760 - DNA, 201 bp, Homo sapiens
aggaggctgaggcaggagaattgcttgagcctgggaggtggaggttgcagtgagccaagatcgctccattgcactccagcctgggtgacagtgaaactccrtctcaaaaataaaagaataaaagtatgtctgtcatccagctcctatgtctgttatccagctccaagtacagcttgtgtatatcaacattttcaaaaacct

SEQ ID NO: 23761 - DNA, 201 bp, Homo sapiens
acaaagacataaaaagtaaatgcaacagtgtgttacaatggagaaagaatcccgtgtggggtattatgggggcacaaagcagggagggataggttcacctygaggagatagaaaaggcttctcagggaggcaacttgagctgagtctttaaatctgtgtagatatctaccgggttgatgggaatgaaggacagttggggag

SEQ ID NO: 23762 - DNA, 201 bp, Homo sapiens
agccagaggggccaagatggccatggggaacagaagttacaaagaagtagaacctcatggtagagaaaagacatgctgagcagagggagaagccgtggttrtttttttggctgagagcagatgaactcagatggtcagcccattaatcacatctgtgtatattaaaaatcttttagtcatgttaaaatatttgcttctaac

SEQ ID NO: 23763 - DNA, 201 bp, Homo sapiens
gagaggcatgtttgtctcagcttaaacgtggctctctggggtgggcccgcctgccctggcctggtggatgggctgatggaggttgctgtgggggccggctygggtcctcaggggccctggggagtgggaacagcactgggggttgaatacctggccccccaggtccagatggccctcttcctgggctctgctgctcccctt

SEQ ID NO: 23764 - DNA, 201 bp, Homo sapiens
ggggccaagatggccatggggaacagaagttacaaagaagtagaacctcatggtagagaaaagacatgctgagcagagggagaagccgtggttattttttyggctgagagcagatgaactcagatggtcagcccattaatcacatctgtgtatattaaaaatcttttagtcatgttaaaatatttgcttctaaccatcaaa

SEQ ID NO: 23765 - DNA, 201 bp, Homo sapiens
gtgtgggaggaggaggactcctaccctggtcgaagttgagtttcttagctggaggagtttctcctagcccttcaatatccaccacgtcactgttggcatcrgagtcgttcagagcactgagtgtcacatctgggaagggggcataagctaggttctaggttcccctgacagcctctcccccagccccaagcttcccaaagc

SEQ ID NO: 23766 - DNA, 201 bp, Homo sapiens
agtatggaatcaggcaattctctggagcagtaaccaaagccagagatacaagcaacgaattgagccatacgggcatcagacttacccagaatgggatcaaytcctccagataccataaaagttgatgtgatattaaactgacaaatagaatcatcaaatataatcctttccgtatatttactgacatttggatgtccccat

SEQ ID NO: 23767 - DNA, 201 bp, Homo sapiens
gcaactgcactccagcctggcgacagagccagactctgtctcaaaaaaaaaaaaaagaaagaaacctgcatatgtatccccaaatctaaaataaaaattgaaaaaaaaaaaaagggctgggtgcagtgggtgcagtagttcactcctgtaatcccagtacttttggaggccaaggcttgtgcatcacctgaggtcaggagt

SEQ ID NO: 23768 - DNA, 201 bp, Homo sapiens
caactgcactccagcctggcgacagagccagactctgtctcaaaaaaaaaaaaaagaaagaaacctgcatatgtatccccaaatctaaaataaaaattgaaaaaaaaaaaaagggctgggtgcagtgggtgcagtagttcactcctgtaatcccagtacttttggaggccaaggcttgtgcatcacctgaggtcaggagtt

SEQ ID NO: 23769 - DNA, 201 bp, Homo sapiens
tgttttgaatacctgggctcaagtgatcctcctgccttgacctcctaaagcactgggattacaggaatgagccaccatgtctgggcccctgtttatttttwtttatttatttatttatttagacagagtcttgctctgttgctcaggctggagtgcaatggtgtgatctcggctcactgcaacctcctcctcctggggtca

SEQ ID NO: 23770 - DNA, 201 bp, Homo sapiens
gtctgccaaggaactttgtgaaggtcttttgcatacgtgcctggtggagattgggcagtaagtccactatatccttctctgtcacatccttagagatgggygggggcttctgcatggtgcatgggccattagggatccaggagtaccagtccagctgcagggaggagagcccagagaaatgcaggctgatgacctgggcat

SEQ ID NO: 23771 - DNA, 201 bp, Homo sapiens
ggaaggtctccgcttttctgggctgggacccggggaaggcagtgggccggcttctggaaggtcggcctgggaggccgtgctggggtctggggatgtcccgyggctagacccggcgcggcccatgtgtcctccagtacctgagctctgccgcccttgaacgctgtgcttccgtcaacgaccaggggttccccagggtaccta

SEQ ID NO: 23772 - DNA, 201 bp, Homo sapiens
gaacaaggggggaaagactgcctcttctccaagatccttcccatgcaccaaagctgtctgactgttgcgatagagctgaaggctttccccgctgagcctakcacttcagctgcgcctctgctcaaggaagctttccaccagcggaaggatctgatgctcaaggcctgccatcccgattctttggtcccacagggtcttccc

SEQ ID NO: 23773 - DNA, 201 bp, Homo sapiens
agaattctcagcttccttgggcaggtggggtgtctcatgatgatgtgagaagaagcagattgtttgcagaggagtgggtgttgacagggttcagtggggarggatccatgtctcacccctggtcttgggccctctgcagtccagtctcagtcatctctctgcaccaggcctgcagctctagatcatccttcatggcttggt

SEQ ID NO: 23774 - DNA, 201 bp, Homo sapiens
tttcaaactctagtaccagatactgttctctggttggttcttatgggcatcacttgtttttctggctaaatactagatctaaggtaggaatatggcttttkttttactagcagtgttcaagccctactgtgagcgcactgctagactgtcagatctctgagaatttcagaggattcctatataatgttaagtgactaaact

SEQ ID NO: 23775 - DNA, 201 bp, Homo sapiens
ggcttgtgcatcacctgaggtcaggagttcaagaccagcctggccaacatggtgaaactctgtctctactaaaaatacaaaaatgagctgggtgtggtggmgggcgcctgtaatcccagctatctgggaggctgaggcaggagaatcacttgaccctgggaggcagaggttgtggtgagccgagattgtgccactgtactc

SEQ ID NO: 23776 - DNA, 201 bp, Homo sapiens
tgcagtccagtctcagtcatctctctgcaccaggcctgcagctctagatcatccttcatggcttggtcactattgtagaaaagcccaaccatcccctccaygtacctattccctgggaagaagacactcagtctcaggggccaatgcaggaccttctggacctacagtcccccgcccctccgttcattgcctctctgtgcc

SEQ ID NO: 23777 - DNA, 201 bp, Homo sapiens
tgccaggctagagtgcaggggcgcgatctcggctcactgcaacctccatctcctgagttcaagcagttctcctgcctcagctgggattacaggcatgtgcyaccacgcccagctaattttgtatttttagtagagacggggtttcaccatggtggccaggctggtctcgaactcctgacctcaaatgatccacccgcctca

SEQ ID NO: 23778 - DNA, 201 bp, Homo sapiens
ccttcattttcctgttataagatggtgatagtgataccaacctcacagagaagttgtgaggataaatttttttttttttgagaccgagtttcactctttgytgtataggctggagtgcaatggtgcaatctcggctcactgcaacctctgcctcctgggttcaagtgattctcctgcctcagcctcccaagtagctgggat

SEQ ID NO: 23779 - DNA, 201 bp, Homo sapiens
taggcctagtaagagattaagaacattaggaataaacaaatataaatgcaaattaaaaataaagaaaaaactataaaaataattagctgggcatggtggcrggcacctgtagtcccagctacctgggaggctgaggctggagaatcgcttgaaccctggaggtggaggttgcagtgagcgagatcatgccattgcactcca

SEQ ID NO: 23780 - DNA, 201 bp, Homo sapiens
tcagattgggcaatttctattctgtcttgcatttcgttaatttttcctctgtttcccccattcgctagtaagcccatatattgagctttttatcttggttwttctatttttcagttctaaaatttccatttggttctttttaaattttttatttctcagctgatatttttcattttctatttgtttcaagtgtgtttataa

SEQ ID NO: 23781 - DNA, 201 bp, Homo sapiens
ctctttattctcaatgtatatggaattctttgggcttaatggatctgagtgttttttttttctctttacagatttggaaagttttctgtcattatattttwtttatttatttatttatttatttattattattatactttaagttttagggtacatgtgcacaatgtgcgggttagttacatatgtatacatgtgccatgc

SEQ ID NO: 23782 - DNA, 201 bp, Homo sapiens
ctgtagtcccagctacctgggaggctgaggctggagaatcgcttgaaccctggaggtggaggttgcagtgagcgagatcatgccattgcactccagcctgrgtgacagagcgagactccatctcaaaaaaaaaaaaaaaaaaaaaaaaagaagcaaaaaagaaaactgaaaaaagaggggagcaacaacaactaatataaa

SEQ ID NO: 23783 - DNA, 201 bp, Homo sapiens
tggaattctttgggcttaatggatctgagtgttttttttttctctttacagatttggaaagttttctgtcattatattttatttatttatttatttatttwtttattattattatactttaagttttagggtacatgtgcacaatgtgcgggttagttacatatgtatacatgtgccatgctggtgcgctgcacccactaa

SEQ ID NO: 23784 - DNA, 201 bp, Homo sapiens
agtgagcgagatcatgccattgcactccagcctgggtgacagagcgagactccatctcaaaaaaaaaaaaaaaaaaaaaaaaagaagcaaaaaagaaaackgaaaaaagaggggagcaacaacaactaatataaaatagaataaaatagaatataatagaacaattgtgacaatctaactataataaaagttgggtgaatg

SEQ ID NO: 23785 - DNA, 201 bp, Homo sapiens
gggatatgtgatttaatagattaataagtaccttgaagatggggtgcagtcctgggaggcaccgcatggtggcgacagcgatgacctcagccaccaggtgmgtgttcagcaagtgatactggatctcgtgcagttggaaatctgaatttcggacccaggactttgccaggagccaggcaagtggggggtctgagggcagga

SEQ ID NO: 23786 - DNA, 201 bp, Homo sapiens
tgagtgagaatatgcggtgtttggttttttgttcttgcgatagtttactgagaatgatgatttccaatttcatccatgtccctacaaaggacatgaactcrtcattttttatggctgcatagtattccgtggtgtatatgtgccattttcttaatccagtctatcattgttggacatttgggttggttccaagtctttgct

SEQ ID NO: 23787 - DNA, 201 bp, Homo sapiens
tggcgtctgccaaggaactttgtgaaggtcttttgcatacgtgcctggtggagattgggcagtaagtccactatatccttctctgtcacatccttagagaygggcgggggcttctgcatggtgcatgggccattagggatccaggagtaccagtccagctgcagggaggagagcccagagaaatgcaggctgatgacctgg

SEQ ID NO: 23788 - DNA, 201 bp, Homo sapiens
gttagcatttctggacacactctggagaattctcagcttccttgggcaggtggggtgtctcatgatgatgtgagaagaagcagattgtttgcagaggagtrggtgttgacagggttcagtggggaaggatccatgtctcacccctggtcttgggccctctgcagtccagtctcagtcatctctctgcaccaggcctgcagc

SEQ ID NO: 23789 - DNA, 201 bp, Homo sapiens
ctcctgtgttggggaaatggtaagtaagacagattttcaccaacagagagcgtttctatctcttctctactcctcccttttaaaattgagattctgacagygtaaaggagttaggacccccttttggggatcgggcatggttttgtggctttaaaatgctttaaaattgctgaagtttcttggtattggaactgtttctcc

SEQ ID NO: 23790 - DNA, 201 bp, Homo sapiens
attttcaccaacagagagcgtttctatctcttctctactcctcccttttaaaattgagattctgacagtgtaaaggagttaggacccccttttggggatcsggcatggttttgtggctttaaaatgctttaaaattgctgaagtttcttggtattggaactgtttctcctaagtaacattttatcatcgcacgtgaaatac

SEQ ID NO: 23791 - DNA, 201 bp, Homo sapiens
tggtggagattgggcagtaagtccactatatccttctctgtcacatccttagagatgggcgggggcttctgcatggtgcatgggccattagggatccaggrgtaccagtccagctgcagggaggagagcccagagaaatgcaggctgatgacctgggcatttgatcccccacttctccatcccaggagcccttgtgggatg

SEQ ID NO: 23792 - DNA, 201 bp, Homo sapiens
gaataaggtaggatataagatttaaaaatataaataggtcatcccctccaaaaaagccgtttgtatgtttaactggtgagtgacagatctgtaataattayttagaaataggaatgtcgaggcgggcggatcacctgaggtcgggagttcgagaccagccaggtcaacatggcgaaaccctgtctctactaaaaattacaa

SEQ ID NO: 23793 - DNA, 201 bp, Homo sapiens
cggtggctcacgcctgtagtcccagcacttggggaggccaagatgggcggatcacgaggtcaggagatcgagaccatcctggctaacacggtgaaaccccstctctactaaaaatacgaaaagttagccaggtgtggtggcgggcacctgtagtcccaggtactcgggaggctgaggcaggagaatggcgtgaacccggga

SEQ ID NO: 23794 - DNA, 201 bp, Homo sapiens
agctgggattacaggtgcgtgccacgacgcctggctaatttttgtatttttagtagagacgggtttcactatgttggccaggctggtctcgaactcctgasctcgtgatccacccacctcagcctcccaaagtgctgggattacaagcgtgagccactgtgcccagctagtgttttgttgtagtagcccaaactgctagga

SEQ ID NO: 23795 - DNA, 201 bp, Homo sapiens
ctgggtgtggcggcatgtgcctgcaatccaggttacttgggaggctgaggcaggaggatcgcttgagcccaggaatttgagactagcttgggccacatagygaaaccctgtctctacaaaaaataaaaaaaattagccaggcatggtggtgcacacctgtagtcccagctactctgaaggctgaggttagaggatcgcttc

SEQ ID NO: 23796 - DNA, 201 bp, Homo sapiens
tactatgcagccataaaaaggaacaagatcatgtcctttgcagggacacagatgaagctggaaaccattatcctcagcaaactaactcaggaagagaaaaycaaacatcgcatgttgtcacttgtaagtggaagctcaatagtgagaacatgtggacacagggacgggaacaacacacattggggcctgtcaggagagggc

SEQ ID NO: 23797 - DNA, 201 bp, Homo sapiens
tggaacatgtgaggacatctggaaattattgaggccggggttcaggactaagaccccagcaatccaaagtcagagcctgcataggccactgttaagacatstgcaggcttgacccttgtgtgcatctgccagcaactcagctgtccgctggggcatggcattactgtggtgagtggagacacggagaggactgaactagga

SEQ ID NO: 23798 - DNA, 201 bp, Homo sapiens
cctgagtagctgggactacaggtgcctgccaccacgcctggctaattttttgtattttttagtagagacgaggtttcaccatgttagccaggatggtctcsatccctgacctcgtgatctgccctccttggccccacaaagtgctgggattacaggcgtgagccaccgcgcccggccgataggtatttgttttccctgaaa

SEQ ID NO: 23799 - DNA, 201 bp, Homo sapiens
tcctgcaggtactgtaggctacagttcccctttccatctaacctagtattgatgaagggcaggatcttggctttgctcgggaaagaattcaagagcaagcyagtgctggaagaaagcaactttactgaggaggcggctgtgtcacagctctgtgaccgctcccggggagcaggactacagcggaggcaatccgagaggaca

SEQ ID NO: 23800 - DNA, 201 bp, Homo sapiens
aggctacagttcccctttccatctaacctagtattgatgaagggcaggatcttggctttgctcgggaaagaattcaagagcaagccagtgctggaagaaarcaactttactgaggaggcggctgtgtcacagctctgtgaccgctcccggggagcaggactacagcggaggcaatccgagaggacagtgcagggtggtgtg

SEQ ID NO: 23801 - DNA, 201 bp, Homo sapiens
taggttacactccttttaatatttaaacaattctgtgcctccaccctgactactagaatatgttcttttccattctccaggatccttcttccgtgatgttygctaacagctctacagtacttactttgggccagacatttttctaagtgctttttacatataataactcataacaactccggactccttagagaggcttgt

SEQ ID NO: 23802 - DNA, 201 bp, Homo sapiens
ttgtgaggcaggtctttctttagaagtaaattttctcattaaaaaatgattgaaaccattttttttagagttctgctgagttcacatttcttggttgaccrataatttttttcaatacaccgaagacctgattctgttattttctggcttccgttgttgttgggagttttgttgttgtgctaattctggttcctttgtagg

SEQ ID NO: 23803 - DNA, 201 bp, Homo sapiens
atgttggaaggcaaagggagagcaggcatgtcatatggcaagagagcaagcaagagagagtgagcaagaaggtatcacaagctttgaaacaaccagatctygtatgaactcattaccactcattacttcaaggatggcaccaagccattcactagggatctgcgcctatgacccaaacacctcccagtaggcccacctcca

SEQ ID NO: 23804 - DNA, 201 bp, Homo sapiens
ttttcctcatctctccccaggattgagttctctgcttctcctttctggaccttcttgcttttgccccatgctggcctcaggccagagcccccccccccccsgccccaccatttctcagctcctccttactcacctggcaatgatctcccagagccgtaaagcatcatgggcatagagagcacctgggagtcccagcaggcc

SEQ ID NO: 23805 - DNA, 201 bp, Homo sapiens
gataatcttccaaatttctctatcattatgtagagatcaccctaccactggccagctagtttgtgttaatgtttttttttgaaatggagtctcgctctgtygctcaggctggagtacaatggcgtgatctcggctcactgcaacctccgccttccaggttcaagtgattctcctgcctcagcctcctgagtagccgggatt

SEQ ID NO: 23806 - DNA, 201 bp, Homo sapiens
gatgggcagaaagcccagcagcacctggagttctttctccagctgggtcttcaagtcttccatccctggaggcagcaccaggcaggctgggagccttgaaraacacctcaggagcatggggtttgcaccattgagaaactggtacccaaagaaggcatcattcttccaagaatcataaacccgctctaggaacatcaattg

SEQ ID NO: 23807 - DNA, 201 bp, Homo sapiens
ccattctattttccccttcctgctgggagctcctcatagtttcttcccctacatattttatttctgtatttttccagcacaggactgcaccaaggggcaaygcagtactgcagccttcctctgactcagtttggattctctctgtccgttctcaccacactactaaggagagaacagtgccaggcaggggaaggagaggta

SEQ ID NO: 23808 - DNA, 201 bp, Homo sapiens
gttatcatgggagtggcttagctgtcgtgggagttaggtctccattttctgtctctgttttgtgtgcttgcttgcccttctgccatgggttgatgcagcargaaggtccttgccagattctgacaccatgttcttaggctttctagcctccagaactgtgagtcaaataaattgctattctttttaaattaaattaaattt

SEQ ID NO: 23809 - DNA, 201 bp, Homo sapiens
gcttccaccctacgtataatccaatataatctggtacaaaatgtcttgaagagtcaaaagaaggtagtttcctaggtgtttaactgtttcaatggctcccrtcagtaagtcatagctagcaatggacttctgacttaaacctgctcatacctgctgctatggtttgaatgtctcctccaaaacccttattgaaatttaatt

SEQ ID NO: 23810 - DNA, 201 bp, Homo sapiens
cgcacctagagcccagcccctcactctgatgtttcctttccaactgtcatttccctctcccgagagtcccctctcaccatgtctggctggcggcgactcaratgccatgagatggccatttgaagacaggcctgccggacatcaggtagtgaccccatcactgtggccatcgtcacatcttccttggtggtgggtgggggc

SEQ ID NO: 23811 - DNA, 201 bp, Homo sapiens
atgggatttcaccgtgttggccaggatggtctcgatctcctgacctcgtgatccacctgccttggcttcccaaagtgctgggattacaggcgtgagccacygcacctggccttcaaatttttttattttaaaattatcatacagtaaaattagctttttggtatacagttctacacattttaacacctgtatagattcatg

SEQ ID NO: 23812 - DNA, 201 bp, Homo sapiens
ttttctaggaggagaacaagtttctgggtactcttaaatattacttgtgagctttaagttactcagtgatttgacttacggtggtggttatctttaaataygtcatgctttttttcttaaccatttttagtgtggactgtatagaatacacaaaaggccaccatatttatatacaatttaaaaaataatttaaagcaaatt

SEQ ID NO: 23813 - DNA, 201 bp, Homo sapiens
cttcctggacctcccgggaaggcgggatcgaggtgggcctgagcccccgggttggagcgaacatagatgagaacacttcccgaggtctccaggtcttctgkggagccaggaggaagtaggggatgagtccatcttccaaacggaggggaaggtctccgcttttctgggctgggacccggggaaggcagtgggccggcttct

SEQ ID NO: 23814 - DNA, 201 bp, Homo sapiens
tgcagtggcgcaatgcgcgatcttgactcactgcaatctccgcctcccgggttcaagtgattctcctgcctcagcctctgagtagctgggattacaggcgsgcaccaccacgcctggctacattttgtatttttagtagagacggggtttcagcatgttagtcaggttggtctcgagctcctgacctcgtgatcttcccgc

SEQ ID NO: 23815 - DNA, 201 bp, Homo sapiens
tagctgcaggatgataaaggggcccgagccagggtgaggccaacggggtgggtgcggcgggaccttcctggacctcccgggaaggcgggatcgaggtgggyctgagcccccgggttggagcgaacatagatgagaacacttcccgaggtctccaggtcttctggggagccaggaggaagtaggggatgagtccatcttcca

SEQ ID NO: 23816 - DNA, 201 bp, Homo sapiens
tttcagttctaaaatttccatttggttctttttaaattttttatttctcagctgatatttttcattttctatttgtttcaagtgtgtttataattgctcaytgaaacctttttttttttttttttttttttttgagacaaagtttcggcctgtcacccagactggagtgcaatagtgtaatctcagctcactgaaaccttc

SEQ ID NO: 23817 - DNA, 201 bp, Homo sapiens
cttttctctctcttgcacccaggcacgctgcagctaccatttcctcccttcactacgttttagattctttccttttcattcctgtcattaccatgctaacrtacatctctatccaccttactgttgggcaggtatgagcggcttgctggctgttcttccttgccttttggtctgtttctacttagctgactcctcaattgg

SEQ ID NO: 23818 - DNA, 201 bp, Homo sapiens
caggcacgctgcagctaccatttcctcccttcactacgttttagattctttccttttcattcctgtcattaccatgctaacatacatctctatccaccttrctgttgggcaggtatgagcggcttgctggctgttcttccttgccttttggtctgtttctacttagctgactcctcaattgggtagaaacattcttcatca

SEQ ID NO: 23819 - DNA, 201 bp, Homo sapiens
gaaagcatgaaattcaagatagaaatgtcagtcctaaagctgatgtgaaatcttgcaggtagagtcactctagggctcagatggtgacactgttctctatrcagctgggcttcagatattcatagggccagtcaagttgctcattccgggctgtaatctccttttccagcttttccaaatctgttcggaattggtttagca

SEQ ID NO: 23820 - DNA, 201 bp, Homo sapiens
gtgactaaacttaataaacttaattaaaatcaacatctcaagatattgagacagtctcctcttcactcacaaattgctacaaagagtttttgctgctgcartatcttttgatatggggctgttcctctctctggggtctgagggatatgtgatttaatagattaataagtaccttgaagatggggtgcagtcctgggaggc

SEQ ID NO: 23821 - DNA, 201 bp, Homo sapiens
gtgcagttggaaatctgaatttcggacccaggactttgccaggagccaggcaagtggggggtctgagggcaggaacagtgttggggttggagagctggggytgggaggctgaatctgggagaaagagaaattattgaactcccattccgtatatgacattatagtcagcattcttggggaaacagagatgactaagtaaga

SEQ ID NO: 23822 - DNA, 201 bp, Homo sapiens
ggtggaatgtgaaggagaagtaggaggtgtaagattattgacagttcttgtcacctgactgttaagaatagtgagagaaggccaggtgcagtggctcacasctgtaatcccagcactttgggaggccgaggcaggcagattacttgagcccagaagttcaagaccagcctgggcaatatggcgaaaccccatctctacaaa

SEQ ID NO: 23823 - DNA, 201 bp, Homo sapiens
cctctcttagcctgtgtaaaactttgggaattcataactccttcccgttttctgtccagcaccctgggatccctacatttcacctgccctgggcccatacmtcctctaagtctgctccgaccgtccttaactctgccctcctagccccgcagcagttcccgggaccttgtgcctccttccccgacgccgcctgctcaccgg

SEQ ID NO: 23824 - DNA, 201 bp, Homo sapiens
tggaatgtgaaggagaagtaggaggtgtaagattattgacagttcttgtcacctgactgttaagaatagtgagagaaggccaggtgcagtggctcacagcygtaatcccagcactttgggaggccgaggcaggcagattacttgagcccagaagttcaagaccagcctgggcaatatggcgaaaccccatctctacaaaaa

SEQ ID NO: 23825 - DNA, 201 bp, Homo sapiens
aacccaggaggcgcaggttgcagtgagccaagatcacacaactgtattccagcctgagtgacacagtgagattctgtctcaaaaaaaaaaaagaaattgcragaaaagatattcaagagatggcgagggttcagagccagaggccactgagagatgagatagtgattctgaaagtgtagtcctgaactggtagtgtcagca

SEQ ID NO: 23826 - DNA, 201 bp, Homo sapiens
cacctcgacctcccaaagtgctgggattacaggcgtgagccaccacgcttggctctagtttgtgttaattttatagtaatatttattatcttttcagtggyttctggtatctggaggtgtttttgcaagcagcagcaatactttttttgggagtgcgtcttgggtggggtttttaaagtctccctttcataaatctacttt

SEQ ID NO: 23827 - DNA, 201 bp, Homo sapiens
tgcacactgaagtgtgaggaccattggatacaggatgagaactccaagaggccattttgactcttgaaaaagtaattctagttggatgaggcaggggagaygagggtacaggcaaatagtgacatgaagacaagtctcactgagtgaggatggggtttgggagccaagagctgggggttgggtccctgggagcagaggttg

SEQ ID NO: 23828 - DNA, 201 bp, Homo sapiens
tttaaagtctccctttcataaatctactttacagcattaatctgtgaggacttgcagtctccacctaacctcaaaaagtaacatgtaaaatcggtgacatsaagattccactgatgtgtgattcagaaatgtcacaccacccgctcatgccatggtgttatcaacattaaaaaatattctgtgatttattttataaaacaa

SEQ ID NO: 23829 - DNA, 201 bp, Homo sapiens
ccaacagagaattatgtggtgcagaatgttaatagtgccaacgttgagaaaccttgggtgtagatggaggagatgagagaaggggctggagatgggaggaraagggaggtgggggtaatggctgggatggtggatgggcagaaagcccagcagcacctggagttctttctccagctgggtcttcaagtcttccatccctgg

SEQ ID NO: 23830 - DNA, 201 bp, Homo sapiens
gtatccatttttagagttcaaagtctacccccagggggccggggcaaagggcaagagatttagtctagcttcttgccattctcctgcatcagtaccggagycctgttgggagaactagagcccctggtccagttcctctcatcttaaagtgaagaaacagtctggtgagggtagatgtcttgtgtgtggatgtggtggcag

SEQ ID NO: 23831 - DNA, 201 bp, Homo sapiens
ttttgaaatttgtttaaaaatgtttaggtttggggttctctttggggttatttgtggtgaccctgtactcttgtataacggctaagtaaaatatttcaagyagtagctggatctcagtctcctgtaatctgagtacactatatcaagaaactcctctattgaagcagcatttccctcttattatatctatacaactgtggt

SEQ ID NO: 23832 - DNA, 201 bp, Homo sapiens
agtgtaatctcagctcactgaaaccttcgcctccctagttcaagcgattctgctgcctcagcctcctgtgtagctgggattacaagcgtgcaccatcatgstcggctaatttttttgtacttttagtagagatggggcttcaccatgttggccaggctggtcttgaactcctgacctcaagtgatctgcccccttcagcct

SEQ ID NO: 23833 - DNA, 201 bp, Homo sapiens
gcaggaggattgctggtagtcaggtgacagagcaagagcctgtctctatttaaaaattaaaaaataaataaataatttaggaatgcgtaatcctattcccrgacagaattacaagtgtctgcgttataatgtggggaataagtcatggatttccagtgtcacagctgagaggggctcccacaaaggttatctcagtccact

SEQ ID NO: 23834 - DNA, 201 bp, Homo sapiens
aatgttttgtaaagggattttaaatcaagtgtatttgaggtagagctcatgtacaatacaatgtattcatttcaaatgtgcgtttccaagtttcagcaaaygtacacacccatgtatccatcactagggaacattttcattaccttaaatgttcttttgtgctcataccagtcagtctccctggctccaggaaacagctgg

SEQ ID NO: 23835 - DNA, 201 bp, Homo sapiens
tatggcctggggggccccaggatatggcagttcaggggcatctgtgactggggtgtagtgggactaggggttgatggccagggtctctgaggaggacagtycttgggtctctagaattgtcctgagtcggaggaggtgggaatgggatacacatgctttcccgtgtggagggaggaagggaggcgtgatgagaggctgggg

SEQ ID NO: 23836 - DNA, 201 bp, Homo sapiens
tagagctcatgtacaatacaatgtattcatttcaaatgtgcgtttccaagtttcagcaaatgtacacacccatgtatccatcactagggaacattttcatyaccttaaatgttcttttgtgctcataccagtcagtctccctggctccaggaaacagctggtctgctttctgtcactacagatttgtcttttctaaagttg

SEQ ID NO: 23837 - DNA, 201 bp, Homo sapiens
atgttcttttgtgctcataccagtcagtctccctggctccaggaaacagctggtctgctttctgtcactacagatttgtcttttctaaagttgtatataartagaattatatataatatactcttctgtatctggctttatccactcagcatcatgtctttgtaatttattcacttttttgtggctatcagtaattcatta

SEQ ID NO: 23838 - DNA, 201 bp, Homo sapiens
tgtgctcataccagtcagtctccctggctccaggaaacagctggtctgctttctgtcactacagatttgtcttttctaaagttgtatataagtagaattayatataatatactcttctgtatctggctttatccactcagcatcatgtctttgtaatttattcacttttttgtggctatcagtaattcattacctaaaaca

SEQ ID NO: 23839 - DNA, 201 bp, Homo sapiens
ttatttctggtctaaattttattattccttttgctaactttgggctttgttcttatttttgtatttctttggggtgtaactttaggttgtttatgtgagawcttttcttttattaacgtaatcatttgttgctataaacttccctccaataactgcttttgctgcatcccatacatcccattttggtttttgtttgtttgt

SEQ ID NO: 23840 - DNA, 201 bp, Homo sapiens
tctctcttttactcattacccatggttaaaaattcactatttgggccgggcgtggtggctcaagcctgtaatcccagcactttgagaggccaaggagggcrgatcacgaggtcaggagatcgagaccatcctggctaatacggtgaaactccatctctactaaaaaaaatataaaaaattagccgggtgtggtggggggtg

SEQ ID NO: 23841 - DNA, 201 bp, Homo sapiens
tagttctagatccctgaggaatcgccacactgacttccacagtggttgaaatagtttacagtcccaccaacagtgtaaaagtgttcctatttctccacatyctctccagcacctgttgtttcctgactttttaatgattgccattctaactgatgtgagatggtatctcattgtggttttgatttgcatttctctgatggc

SEQ ID NO: 23842 - DNA, 201 bp, Homo sapiens
gccgggtgtggtggggggtgcctgtagtcccagctactcgggaggctgaggcaggagaatggcgtgaacccaggaggtggaggttgcagtgagccaagatsgcgccactgcactccagcctgggcaacaaagcaagactccatctcaaaaaaaaaaaaaaaaaaattcactatttgccatcctcattcctcctcgtctcct

SEQ ID NO: 23843 - DNA, 201 bp, Homo sapiens
gggtgtggtggggggtgcctgtagtcccagctactcgggaggctgaggcaggagaatggcgtgaacccaggaggtggaggttgcagtgagccaagatcgcrccactgcactccagcctgggcaacaaagcaagactccatctcaaaaaaaaaaaaaaaaaaattcactatttgccatcctcattcctcctcgtctcctgcg

SEQ ID NO: 23844 - DNA, 201 bp, Homo sapiens
ccagctactcgggaggctgaggcaggagaatggcgtgaacccaggaggtggaggttgcagtgagccaagatcgcgccactgcactccagcctgggcaacaragcaagactccatctcaaaaaaaaaaaaaaaaaaattcactatttgccatcctcattcctcctcgtctcctgcgggccagtgtgcttcttgtctttcacg

SEQ ID NO: 23845 - DNA, 201 bp, Homo sapiens
gcgttttcattctcaaggcctctctgagttgaccagatatgataaggtctcttcttgcaaagagttacgggggactgtggagtgtgatgagtcatccagasgggccattaagggattatggagacctcggggaaccactgaccagccagggcactcttctggccccagaagatctgatcaaagtcttctaggcagttccag

SEQ ID NO: 23846 - DNA, 201 bp, Homo sapiens
cctgccctgggcccatacatcctctaagtctgctccgaccgtccttaactctgccctcctagccccgcagcagttcccgggaccttgtgcctccttccccracgccgcctgctcaccggtgccctcgggcaggctcaggatgtcctcgccctgcacccagcggtagcacgggaaggccacctccgcgcaggctccagggcc

SEQ ID NO: 23847 - DNA, 201 bp, Homo sapiens
agagattaagactggcgtgttcaggccgggtgcggtggctcacgcctgtaatcccagcactttggaaggccgagacgggcggatcacgaggttaggagatygagaccatcctggctaacacggtgaaaccctgtctctactaaaaatacaaaaaaaattagctgggcgtggtggcgggcacctgtggtcccagctactcgg

SEQ ID NO: 23848 - DNA, 201 bp, Homo sapiens
tcttttacagtagcctccccccacccgcttcttcctccagcctgccaggggctgtgccccttctccaccgagctcaccagtaccctcaggcaggcagatarttccgtggccctgcacccagcggtagcaggggaaaaaggcctcgccttgggtccccgggccctgcactgagatccacttgcagaaccagtcgagactcaa

SEQ ID NO: 23849 - DNA, 201 bp, Homo sapiens
attactctcctatgttttttgtctaaaagttttatagctttgggaagccgaggtgggcagatcacgaggttgggagtttgagaccagcctggccaacatgrtgaaacccccgtctctactaaaaatacaaaaattagctgggcatgatggcgggtgcctgtaatcctagctactcgggaggctgaggcaggagaatcactt

SEQ ID NO: 23850 - DNA, 201 bp, Homo sapiens
gtcacagtttgtgagacaggcaataagaggagttcattcaactaattcattcaactaatatttgctaagtatctaccacaaactcccaaacttctagaaaytgaagacacagcagtaaacaaagagacaaaaatcccactcttattctgttacacaccatatatttactatatatatatatattctggagtatttaaaagc

SEQ ID NO: 23851 - DNA, 201 bp, Homo sapiens
actggcatctgcatcaggtgagggcctcaggctgcttctactaatggtggaaagtgaaggggagccagcgtgtgtggagatcacatggcgagagaggaagyaaggtgtggaggcggtgccaggctctttttaacaatcagttctcccggtaatgaacagaggaagaacttacccttgagcgaaggcactaatttattgatg

SEQ ID NO: 23852 - DNA, 201 bp, Homo sapiens
gcagggaaagctatgtggagatacagaaaagaacttttctgtggttctggcctgcacaccctaggactcccaccttgtgtgtgctcaaaggttaatgcacktgggatgaaccttgagctatggggagaggggagggaagagtgagggaaaatacctaagagaagttttgtatctagttccagaggaagctcttagtgcaga

SEQ ID NO: 23853 - DNA, 201 bp, Homo sapiens
tgacagttatgcactaggtgcagaaggaaacaagtccagcctgaagaagtgggacaccaggactccagggagagacacactgagggcttccatcaccaccrtccccactgccatcatgctaacttttaaatcaaggactcaatacccagagtctggcccagatttttcctttgtactttctttattttgaccacatgctga

SEQ ID NO: 23854 - DNA, 201 bp, Homo sapiens
tttatcttctcctcctgcgccttcctcaaacagtggtaacatcaccctttccttattcttctagattggtgcttgctgctcagtgtttcaaaactaagtcrtgttgtttagggatgtatatattggtggaaaactgtaaaggaaacaggagaatgattaacataagtcatcatcgtggttatcactgcggatggagaagag

SEQ ID NO: 23855 - DNA, 201 bp, Homo sapiens
atacaaaaaattagccaggcgtggtagaggatgcctgtaatcccacctacttgggaggctgaggcaggagaattgcttgaacccgggaggcggaggttgcsgtgagctgagattgtgccactgtactccagcctgggcaacaagagtgagactttgtctcaaaaaaaaaaaaaaaattttacaagttttctaaagcaaatt

SEQ ID NO: 23856 - DNA, 201 bp, Homo sapiens
tacaggcacgcaccaccatgcctggctaatttttgtatttttggtagagatggggttttaccatgttggccaggctggtctcgaactcctgacctcaggtrattcccgccccccttggcctcccaaagttctgagattacaggcgtgagccaccgcgcctggccagtgttttgttatagtagcccaaactgactagcagcc

SEQ ID NO: 23857 - DNA, 201 bp, Homo sapiens
actctagggctcagatggtgacactgttctctatgcagctgggcttcagatattcatagggccagtcaagttgctcattccgggctgtaatctccttttcyagcttttccaaatctgttcggaattggtttagcacagctttgggcttggggcctgagaaatatttttctttgtggtgccccagaggcacctgagacagaa

SEQ ID NO: 23858 - DNA, 201 bp, Homo sapiens
tacggaaaaattaagcagaaagtgagaatctattttttgagcagaaatttttgagagctcacaaaatttcagggtctgttgtaatagttgggtttctgttycaatgagcttgtggatacaccaatagcttatagccaagtgcatatcagtacccatcaaatccatgagtgagatatttttctttaaatcacatggctctaa

SEQ ID NO: 23859 - DNA, 201 bp, Homo sapiens
atcacggctcactgcagccttgatctcccaggttcaggtgattgattatactgcctcagcctccccagtagctgggactacaggcccgtgccaacatgccygactaatttttgtattttttgtagagatggggttttgccatgttgcccaagctggtctcaaactcttgggctcaagtgatccgctggccttggcctccct

SEQ ID NO: 23860 - DNA, 201 bp, Homo sapiens
gatcaggaaacatcagaagcttgggtcagcttactgcccatagctctcttaaaaatctgtaatacccctagagcaaaatttaatataagcctatacgaagsctattagtttgtttttatgtgtgtgtgtgtgtgtttttttttttttttttgagacggagtctctctctatcgcctaggctggagtgcagtggcacgatct

SEQ ID NO: 23861 - DNA, 201 bp, Homo sapiens
gtaaatcttctttcaaactcccgattccctgctgtctgtgccagtagccaagccaactcccacattcccattacctctctttgcagaacaatttaccttckgtgtgtgttttttttttttgagatagaatcatgatcttggctcactgcaatctctacctcccaggttcaagtgattctcctgcctcagcctcctgagtag

SEQ ID NO: 23862 - DNA, 201 bp, Homo sapiens
cctcacttttcctcatctctccccaggattgagttctctgcttctcctttctggaccttcttgcttttgccccatgctggcctcaggccagagcccccccscccccggccccaccatttctcagctcctccttactcacctggcaatgatctcccagagccgtaaagcatcatgggcatagagagcacctgggagtcccag

SEQ ID NO: 23863 - DNA, 201 bp, Homo sapiens
agtttggattctctctgtccgttctcaccacactactaaggagagaacagtgccaggcaggggaaggagaggtacctgaagttctttctccagttgagccygaagctcttccatccccgagggcagcactagcctggagggcagagaggtcgagcgtctcaacagcatggggttggcaccattgaggaactggtagctgaa

SEQ ID NO: 23864 - DNA, 201 bp, Homo sapiens
ggaggcggagctggcagtgagccgagatcgcgccactgcactctagcctgggcgacagagggagactctgtctcaaaaaaaaaaaaaaacaaaaaaaaacyggtgtgttcaatatttgaataattggtgctcaagagagaaaaagaatatgtaggagaggcagtcatcaataaaaccatacagaaaagtttactcaaaact

SEQ ID NO: 23865 - DNA, 201 bp, Homo sapiens
tttcctcatctctccccaggattgagttctctgcttctcctttctggaccttcttgcttttgccccatgctggcctcaggccagagcccccccccccccgrccccaccatttctcagctcctccttactcacctggcaatgatctcccagagccgtaaagcatcatgggcatagagagcacctgggagtcccagcaggccc

SEQ ID NO: 23866 - DNA, 201 bp, Homo sapiens
tccgttctcaccacactactaaggagagaacagtgccaggcaggggaaggagaggtacctgaagttctttctccagttgagcctgaagctcttccatcccygagggcagcactagcctggagggcagagaggtcgagcgtctcaacagcatggggttggcaccattgaggaactggtagctgaacaactcatcatcctgcc

SEQ ID NO: 23867 - DNA, 201 bp, Homo sapiens
tatcctgataaacccattgtaagttgaaaatatcgttaagtcaaaaatgcatgtaatacacctaacctagtctaaggtagcttagcctagcctaccttaartgtgctcagaacacttacattagcctcaagttggcaaaatgatctaacgcacagcccattttataataaagtgttgcctatctcatgtaatttattgaat

SEQ ID NO: 23868 - DNA, 201 bp, Homo sapiens
ccatgtgttctcattgttcagctccccgttatgagtgagaacatgcggtgtttggttttctgttcctgtgttactttgctgagaatgatggtttctagctycatccatgtccctgcaaaggacatgaaatcatccttttttatggctgcatactattccatggtgtatatgtgccacattttctttatccagtctatcatt

SEQ ID NO: 23869 - DNA, 201 bp, Homo sapiens
tctggtcatgggatccagaaatctgcatttcaacaggcattcaggtgattctgatgcacactgaagtgtgaggaccattggatacaggatgagaactccargaggccattttgactcttgaaaaagtaattctagttggatgaggcaggggagacgagggtacaggcaaatagtgacatgaagacaagtctcactgagtga

SEQ ID NO: 23870 - DNA, 201 bp, Homo sapiens
agtagcaaattctttttgtttaggtttaaattcctaagaacagttggtttaattcatctctttacctcgtgtcagtggtcggaggtcagaggccatcctattttttttttttcctgagtttttattttgaaaagccttagggtctgggcccagtggctcatgcctgtaatcccaacactttgggaggccaaggcgggtgga

SEQ ID NO: 23871 - DNA, 201 bp, Homo sapiens
gcaggttagttacatatgtatacatgtgccatgctggtgcgctgcacccactaactcgtcatctagcattaggtatatctcccagtgctatccctcccccstccccccaccccacaacagtccccagagtgtgatgttccccttcctgtgtccatgtgatctcattgttcagttcccacctatgagcgagaatatgtggtg

SEQ ID NO: 23872 - DNA, 201 bp, Homo sapiens
ccccctccccccaccccacaacagtccccagagtgtgatgttccccttcctgtgtccatgtgatctcattgttcagttcccacctatgagcgagaatatgyggtgtttggttttttgttcttgtgatagtttactgagaatgatgatttccaatttcatccatgtccctacaaaggacatgaactcatcattttttatggc

SEQ ID NO: 23873 - DNA, 201 bp, Homo sapiens
tcctctgcaacgtcatgatcaaactcctcctcctgtgcaggccggacccaggccagacttagtaggagggacccgactgaggccgtttcgaggacagagcygcgctcctgtgcaacctcagtttctcagggcctccaaagacagcatcgcctcgttcccgcccccgcacaacctgctctttgggtctcagacgcccggagt

SEQ ID NO: 23874 - DNA, 201 bp, Homo sapiens
tgaaaattggtgatcatgaatttaccgcctgaacgcatgcacctgaacgtcttccattcacttattctggagctggctctactcgacatttcctttttttwatttttttttttttgagacagggtctcactgtgtcacccacactggagtgcagtggtgcgatctcggctcaccgcaacctccgcctcccaggctcaagcg

SEQ ID NO: 23875 - DNA, 201 bp, Homo sapiens
ccgccctcctcgcaagttttaggcgctcccaagtccccgccccagactagcccaaacctgcgagcagagcggtagagccggctgtggggactggctgtgcytcctggtcggagcgtagctgcaggatgataaaggggcccgagccagggtgaggccaacggggtgggtgcggcgggaccttcctggacctcccgggaaggc

SEQ ID NO: 23876 - DNA, 201 bp, Homo sapiens
tgtacagaagctctttaatttaattagatcccatttgtcaattttgtcttttgttgccattgcttttggtgttttagacatgaagtccttgcccatgcctrtgtcctgaatggtattgcctaggttttcttctagggtttttatggttttaagtctaacgtttaagtctttaatccatcttgaattgatttttgtatgagg

SEQ ID NO: 23877 - DNA, 201 bp, Homo sapiens
ctggtcggagcgtagctgcaggatgataaaggggcccgagccagggtgaggccaacggggtgggtgcggcgggaccttcctggacctcccgggaaggcggratcgaggtgggcctgagcccccgggttggagcgaacatagatgagaacacttcccgaggtctccaggtcttctggggagccaggaggaagtaggggatga

SEQ ID NO: 23878 - DNA, 201 bp, Homo sapiens
agagagagagagtgagagagagagagagagagagagagagagagagaaaatggctcaacagcaaatgcaggcatttatgtccaggataaacttatagaggkgggggaccagcttagtgtcagtgcccactgcttacaggctggggtatttataggtatgggcgggaggggcctgggcagtatggcttgctgcctgatagga

SEQ ID NO: 23879 - DNA, 201 bp, Homo sapiens
ttttgtcaatttttttctgcttctgatgagataatcatatgatttttgtcatttattctgttaatgtggcatatcatttattgacttgcatatgttgaacmctccttgcattccagagataaagacatttctcaaaagaatacatataaatggctaacagatataatgaaaaatactcgatattgctaatcattagggaaa

SEQ ID NO: 23880 - DNA, 201 bp, Homo sapiens
gcttgggtcagcttactgcccatagctctcttaaaaatctgtaatacccctagagcaaaatttaatataagcctatacgaaggctattagtttgtttttakgtgtgtgtgtgtgtgtttttttttttttttttgagacggagtctctctctatcgcctaggctggagtgcagtggcacgatcttggctcactgcaagctcc

SEQ ID NO: 23881 - DNA, 201 bp, Homo sapiens
attgtctcagcacagcttggggctcaggaccagagaaatatttctcctcatgctgagaggcagaagacaagttggctcagccccttgggactctcagcccrgaatacttcccctcctttgagctgcctccttcccaggacccaggcatttgcttctcaccatgacaggctggcgtctgccaaggaactttgtgaaggtctt

SEQ ID NO: 23882 - DNA, 201 bp, Homo sapiens
tttttttgagatggactctctccgtcgctccgactggagtgtagtggtgcggtcttggcccactgcaacctccgcctcttggattcaagtgattctcctcsctcagcctcctgagtagctcggattacaggcatgaaccaccacgcctgtctcatttttgtatttttagtagacacagggtttcaccatattggccaggct

SEQ ID NO: 23883 - DNA, 201 bp, Homo sapiens
ctggtctcgaactcctgacctcaggtgatccgcctgcctcagcctcccaaagtgctaggattacaggcatgagccacagtgcctggcctcaatcatgaatyttcttaatggcatctaaatggtgactcctttctagaaggttttcagttcattttgcccagatctatctatggcagctatatagccttatgaaatgtattt

SEQ ID NO: 23884 - DNA, 201 bp, Homo sapiens
tgttgtttgtgtggttagaatttggtgtagaagggtagactgcagtatctattagttcatcatcttataaccagtattggatattttgttcttcttctccttttttttttttttttgagacagggtctcactctgtcacctaggctggagtgtggtgatgtgatcatagctcactgcagcctcaatctcctggcctcaagt

SEQ ID NO: 23885 - DNA, 201 bp, Homo sapiens
gttgtttgtgtggttagaatttggtgtagaagggtagactgcagtatctattagttcatcatcttataaccagtattggatattttgttcttcttctccttttttttttttttttgagacagggtctcactctgtcacctaggctggagtgtggtgatgtgatcatagctcactgcagcctcaatctcctggcctcaagtg

SEQ ID NO: 23886 - DNA, 201 bp, Homo sapiens
accagtaccatgctgttttggttactgtaaactacttttccattcagatcattttagtttggttaattatgtaaaagcaaatatttgtttagagtaatgcygctgctccattaatgaattattgcctggttccctcgttattgtacatctcagtcactttcaattatgctcaaaaggcgcatctctcaaaggaatcttttt

SEQ ID NO: 23887 - DNA, 201 bp, Homo sapiens
gctgaggcaggagaatcacttgaacctgggaggcggaggttgtggtgagctgagattgctccattgcactccagcctgggcaacaagagcaaaactctatytcaaaaaaaaaaaaaaaaaaaaaaaaaaaaagaatcctgactgaagcctaggagcacagagattggaagagtcaggggagttttcaatgagaagttaata

SEQ ID NO: 23888 - DNA, 201 bp, Homo sapiens
actctcccatttcatcatcttttttggcattagaaatccctacaagcttcaggatttttctcttaaagcaaatactgaagataaaaaaattagcttcattsaggctatcttttatcaaatagcacataatttatacagacttggtgggaaattctgccagtgaacaactttgttgtttcaaatcatcaagccccatttgaa

SEQ ID NO: 23889 - DNA, 201 bp, Homo sapiens
gcctcacgaactgcaggagccccaagtcctctgcaacgtcatgatcaaactcctcctcctgtgcaggccggacccaggccagacttagtaggagggacccractgaggccgtttcgaggacagagccgcgctcctgtgcaacctcagtttctcagggcctccaaagacagcatcgcctcgttcccgcccccgcacaacctg

SEQ ID NO: 23890 - DNA, 201 bp, Homo sapiens
ccagagccctaggacaggtattgaggcttaactcatcagctgatccctcagtccctcaccgtctatcatcattcttggccctcccagcccttatttcactycgaggtctagcctttttctcaccctgccttcagtgtccattcaaagtccagcctcttctcctcatggaatctcatatttggaggtagatcatccttacgg

SEQ ID NO: 23891 - DNA, 201 bp, Homo sapiens
attttcctgtcttacactcaggtgaaaaatcatttggatatatatctgatggctttacaaaaattatttacaaaaagtaattgcatataatacagtgtttwtgccaaagtatgtttatgtcttaaaaactttagtggaaatgtgtattcaggtcccttgctcattttctaattgggtttcttgttttcttaatattgagtt

SEQ ID NO: 23892 - DNA, 201 bp, Homo sapiens
gacccatgaggagacgtctttggtgtgctggggagagataataaaggcctgcagcaagcaggggaagcaggaatggagacgggcagggtggaagacatgcraaggaagtggagcggtcaggactccattgtttaattggtgatgacaggaagagaaagagaaagagtagactgtgtgagagagagcagaagagaaggaaag

SEQ ID NO: 23893 - DNA, 201 bp, Homo sapiens
gacctcggggaaccactgaccagccagggcactcttctggccccagaagatctgatcaaagtcttctaggcagttccaggagctcaggagggtgtaaacaygtttgagggccatctccagagccctaggacaggtattgaggcttaactcatcagctgatccctcagtccctcaccgtctatcatcattcttggccctccc

SEQ ID NO: 23894 - DNA, 201 bp, Homo sapiens
ccctgggatccctacatttcacctgccctgggcccatacatcctctaagtctgctccgaccgtccttaactctgccctcctagccccgcagcagttcccgrgaccttgtgcctccttccccgacgccgcctgctcaccggtgccctcgggcaggctcaggatgtcctcgccctgcacccagcggtagcacgggaaggccac

SEQ ID NO: 23895 - DNA, 201 bp, Homo sapiens
aatgggatacacatgctttcccgtgtggagggaggaagggaggcgtgatgagaggctggggtcctgtccccagaagggcagggctgggaaggcgccctggsagagtctcccaggagcttcttctgtctctagaatggatcttacctcggtcctgggcctggcacagccccacctccgtgatctcccgacaccaggcctgca

SEQ ID NO: 23896 - DNA, 201 bp, Homo sapiens
tttatttatttattttcccccagtattttatttactggtttgatggttcaggtttcaggccagtagaagaggtgtccctgagtaggaatcggttgtgggtraagcaagtgggtaaatgaagacccaggcttgacagaggtggctggaggagccctcggtgagtcacagtgaggtcttatcagggagaagggttggagccac

SEQ ID NO: 23897 - DNA, 201 bp, Homo sapiens
ctgatgtgtctagttatagatttatgttcattttttctgcttgggatgtaccagtctgtggggtttgatgtgaagcctgcagaactgtgtaccagttaacyctcttttcttcataaattatccagcctcaagtatttctctatagcaatgcaaaaatggcctaatccaccttctttgtgtctttttacagtttttgacttg

SEQ ID NO: 23898 - DNA, 201 bp, Homo sapiens
ctgaccagccaggacagtctttccatgtgggaatatttttttgaaatcttccagccttttcacacaatttatgaaatccagtgtccccttaatggccaagyccttcaacctgtggaaagaatggagtgcaagaagatcaaggaagcatcccaccttgtgccctaggaagcaagtgcccagcctctacctggtactcaccct

SEQ ID NO: 23899 - DNA, 201 bp, Homo sapiens
aaagggttccgtgtggaagcgcctgatcaccaccacccggtttgggtgagggacctgagtccttttcttttcagtcttgcagcagctgtttcctggcaggrcaaatggtcagaaataccatatgtacaggccttcacggccctacgccaaaacctaatcatctccgcaaagaaagtccaaagacaggactagatagtatag

SEQ ID NO: 23900 - DNA, 201 bp, Homo sapiens
ctgcaacctctgcttcctgggttcaagcgattttcctgcctcagcctcccgagcagctgggattataggcacacatcaccatgcccagctaattattattwttttttttttggtagggacggggttttaccatgttggccaggatgatctcgatctcctgacctcatgatctgcctgcctcggcctcccaaagtgctggga

SEQ ID NO: 23901 - DNA, 201 bp, Homo sapiens
gtgagccagccaggaggtaagcccaacgtttgggatttattttcctttttgtcctctttctctctcttttcctttccaactcgggactctcggtggacagygcctaggcatggaggcaaccgcaggtttgtggttggggccactctccagggaaactgaaagggttccgtgtggaagcgcctgatcaccaccacccggttt

SEQ ID NO: 23902 - DNA, 201 bp, Homo sapiens
tggggacacttgctgaggaaacacacgaggatggggagtagattggggaggaaaatgggagtgaggtgacacatctagaaaatgggagagccgctgggtgyggtggctcacacctgtatgtaatcccagcactgtgggaggccgaggcgggtgggtcacctgaggtcaggagtttgagaccagcctgaccaatatgatgaa

SEQ ID NO: 23903 - DNA, 201 bp, Homo sapiens
atttatttatttagacagagtcttgctctgttgctcaggctggagtgcaatggtgtgatctcggctcactgcaacctcctcctcctggggtcaagtgattytcctgcctcagcctccccagtagctgggattacaggcacctgccatcacgcccagctaagttttgtatttttagtagagacggggtttcaccatgatggc

SEQ ID NO: 23904 - DNA, 201 bp, Homo sapiens
tgttttcttctaacatttttatgatttcaggtcttacatttaagtctttaatccattttgagttgacttttgtgtatgttataaataaggtctaatttcatttttttaatgtttatgttcagctcttttgtttttgctcacaatttctttagatattagaagtcttttgtagctcaatacaagttttaggatttctttttt

SEQ ID NO: 23905 - DNA, 201 bp, Homo sapiens
gtgcttgttagcatttctggacacactctggagaattctcagcttccttgggcaggtggggtgtctcatgatgatgtgagaagaagcagattgtttgcagrggagtgggtgttgacagggttcagtggggaaggatccatgtctcacccctggtcttgggccctctgcagtccagtctcagtcatctctctgcaccaggcc

SEQ ID NO: 23906 - DNA, 201 bp, Homo sapiens
ccatgtttttttttttttttttttttttgcagattaattaccttctttcaaacagttggaatcacttccttcatagtaattaagtagaatcttttaattcwtttctataacaaacattcctgacagcataggtgtccacctcctgaagttcccatgaaatcttttaaccattcatttcctcttgcctggagatgattgtgc

SEQ ID NO: 23907 - DNA, 201 bp, Homo sapiens
tgcccatagctctcttaaaaatctgtaatacccctagagcaaaatttaatataagcctatacgaaggctattagtttgtttttatgtgtgtgtgtgtgtgtttttttttttttttttgagacggagtctctctctatcgcctaggctggagtgcagtggcacgatcttggctcactgcaagctccgcctcccgggttcacg

SEQ ID NO: 23908 - DNA, 201 bp, Homo sapiens
acgaaggctattagtttgtttttatgtgtgtgtgtgtgtgtttttttttttttttttgagacggagtctctctctatcgcctaggctggagtgcagtggcrcgatcttggctcactgcaagctccgcctcccgggttcacgccattctcctgcctcagcctcccgagtagctgggactacaggcgcccgccagcacgccca

SEQ ID NO: 23909 - DNA, 201 bp, Homo sapiens
agcgccactacgcccagctaatttttgtatttttagtagataccatgtttcaccatattggccagggtggtctcgatctcttcacctcgtgatccgcccamcttggcctcccaaagtgctgggattacaggcatgagccactgcgcctggccagtgaaggcttttgtgatgagttaaaacatggtggaaaaggtcaaaggg

SEQ ID NO: 23910 - DNA, 201 bp, Homo sapiens
ccagcctgtgagtggcgttcttcctggcagtccaggatttgtgcaagtgagtttgcatgtggagtgaatttcttgctatcctcatacctgggttttttttktttttttttttttgagacagagttatgctcttgttgcccaggctagagtgcaatggtggcatctcagctcactgcaacttccacctcccaggttcaaatg

SEQ ID NO: 23911 - DNA, 201 bp, Homo sapiens
aggcctgagccactgtgcccggccttgtttttttggacatggaattttcgctcttgttgcccaggctggagtacaatgccttgatcttggctcactgcaayctctgccttccgggttcaagcgattctcctgcctcggcctcccgagtagctggaattacaggcatgaaccaccatgcccggctaattttgtatttttagt

SEQ ID NO: 23912 - DNA, 201 bp, Homo sapiens
gctagagtgcaatggtggcatctcagctcactgcaacttccacctcccaggttcaaatgattctcctgcctcagcctcccgagtagctgggattacaggcrtgcaccaccatgcctggctaattttttttttttgtatttttagtagagatggggtttctccatgttggtcaggctggtttgaactcccgacctcaggtga

SEQ ID NO: 23913 - DNA, 201 bp, Homo sapiens
ccgttgtttagtgttgccaccttcttcagtgatcttagctggatcttctggataacttgctgcagcttctccatcagcacttgctgcttcaccttgcactyttatgttatggagatggctactttccttaaacctcatgagccaactctgctagcttcctgcagcttccttatctctctcacccttaacagatttgaagaa

SEQ ID NO: 23914 - DNA, 201 bp, Homo sapiens
ccttccgggttcaagcgattctcctgcctcggcctcccgagtagctggaattacaggcatgaaccaccatgcccggctaattttgtatttttagtagagayggggtttctccacgttggtcaggctggtcttgaactcctaacctcaggtgatctgcccgccttggcctcccaaagtgctgggattacagaaggctattct

SEQ ID NO: 23915 - DNA, 201 bp, Homo sapiens
gcggtcaaagtactgggattagatagttggatacacctttcaaggatcaagtctgtgatacctgaagccccggacctggaacctgaagttcccatcagccmctgcacctgtgaacctgtggcagccctgaagtacctgtttagaagacagccaaaagagaaatgcctaccaacgttccttggtgtttttgttgcatagtta

SEQ ID NO: 23916 - DNA, 201 bp, Homo sapiens
gatacctgaagccccggacctggaacctgaagttcccatcagccactgcacctgtgaacctgtggcagccctgaagtacctgtttagaagacagccaaaaragaaatgcctaccaacgttccttggtgtttttgttgcatagttactgtaggctggataatagtagccatgtttttttttttttttttttttttgcagatt

SEQ ID NO: 23917 - DNA, 201 bp, Homo sapiens
ctagtgatggccttatagtttcatgttgactcactatttaatatttcttttaaaatttttcatgtagttggaagtagtcatcccctttttttctggagaattattattattattattattattattttattattattatcttggttcctgcctattaatcttaggagggatagaagacagttgtgttagcattagtctgct

SEQ ID NO: 23918 - DNA, 201 bp, Homo sapiens
tacctgaagccccggacctggaacctgaagttcccatcagccactgcacctgtgaacctgtggcagccctgaagtacctgtttagaagacagccaaaagaraaatgcctaccaacgttccttggtgtttttgttgcatagttactgtaggctggataatagtagccatgtttttttttttttttttttttttgcagattaa

SEQ ID NO: 23919 - DNA, 201 bp, Homo sapiens
agtgatggccttatagtttcatgttgactcactatttaatatttcttttaaaatttttcatgtagttggaagtagtcatcccctttttttctggagaattattattattattattattattattttattattattatcttggttcctgcctattaatcttaggagggatagaagacagttgtgttagcattagtctgcttt

SEQ ID NO: 23920 - DNA, 201 bp, Homo sapiens
actgcaaccctgagctccttggttcgagtgggcctcctggctcagccttgtgagtagctaggactgcaggtgcacaccactgcattggctaatttttaaattttttgtagagagatgaggttgcactatgttattatgttattcagcttgttttgaatacctgggctcaagtgatcctcctgccttgacctcctaaagcac

SEQ ID NO: 23921 - DNA, 201 bp, Homo sapiens
tgtgaacctgtggcagccctgaagtacctgtttagaagacagccaaaagagaaatgcctaccaacgttccttggtgtttttgttgcatagttactgtaggstggataatagtagccatgtttttttttttttttttttttttgcagattaattaccttctttcaaacagttggaatcacttccttcatagtaattaagtag

SEQ ID NO: 23922 - DNA, 201 bp, Homo sapiens
tgtctcatgatgatgtgagaagaagcagattgtttgcagaggagtgggtgttgacagggttcagtggggaaggatccatgtctcacccctggtcttgggcyctctgcagtccagtctcagtcatctctctgcaccaggcctgcagctctagatcatccttcatggcttggtcactattgtagaaaagcccaaccatcccct

SEQ ID NO: 23923 - DNA, 201 bp, Homo sapiens
tgaagtacctgtttagaagacagccaaaagagaaatgcctaccaacgttccttggtgtttttgttgcatagttactgtaggctggataatagtagccatgtttttttttttttttttttttttgcagattaattaccttctttcaaacagttggaatcacttccttcatagtaattaagtagaatcttttaattcatttct

SEQ ID NO: 23924 - DNA, 201 bp, Homo sapiens
gggatccaggagtaccagtccagctgcagggaggagagcccagagaaatgcaggctgatgacctgggcatttgatcccccacttctccatcccaggagccsttgtgggatgatcacataggttacctggcccaggtggttagaagcatgctgacctgtgcatgtgaagatgcacatggtgacaaagtggcagagctgagcc

SEQ ID NO: 23925 - DNA, 201 bp, Homo sapiens
tccttatttaagtgtattcctaagtattttattcttcctgatgttattgtagatggaattgttatcttaatttcttttttggatagttcgttgtcagggtrtagaaatgctactgatactgtaggttggtttttgtatcctgcaactttactgaattcatttattagttttagcagtttttttggtggaatctttagggtt

SEQ ID NO: 23926 - DNA, 201 bp, Homo sapiens
tgcctagtgatggccttatagtttcatgttgactcactatttaatatttcttttaaaatttttcatgtagttggaagtagtcatcccctttttttctggakaattattattattattattattattattttattattattatcttggttcctgcctattaatcttaggagggatagaagacagttgtgttagcattagtct

SEQ ID NO: 23927 - DNA, 201 bp, Homo sapiens
tccagctgcagggaggagagcccagagaaatgcaggctgatgacctgggcatttgatcccccacttctccatcccaggagcccttgtgggatgatcacatrggttacctggcccaggtggttagaagcatgctgacctgtgcatgtgaagatgcacatggtgacaaagtggcagagctgagcccgggactctaaggagatg

SEQ ID NO: 23928 - DNA, 201 bp, Homo sapiens
ctgagcccgggactctaaggagatgaggaacctggtgaaatgagaatcctggtgaaatgagaatcagagatctcgaaaccagaacacgaaataggtctcasgcagggaaagctatgtggagatacagaaaagaacttttctgtggttctggcctgcacaccctaggactcccaccttgtgtgtgctcaaaggttaatgcac

SEQ ID NO: 23929 - DNA, 201 bp, Homo sapiens
gaggagtgggtgttgacagggttcagtggggaaggatccatgtctcacccctggtcttgggccctctgcagtccagtctcagtcatctctctgcaccaggyctgcagctctagatcatccttcatggcttggtcactattgtagaaaagcccaaccatcccctccacgtacctattccctgggaagaagacactcagtctc

SEQ ID NO: 23930 - DNA, 201 bp, Homo sapiens
aatggatcttacctcggtcctgggcctggcacagccccacctccgtgatctcccgacaccaggcctgcagctcagggtcccccttcactatgtcatccctytggtagaagaggtggacgatcccctccacatacctgcccagggggaaaaggcacttgagggcagaaagcccccgcctctgacctctattcctctttctgt

SEQ ID NO: 23931 - DNA, 201 bp, Homo sapiens
caaacacctcatttttgctgactctggtttcttctaactttactgtttctgacaattactctggtttgtaagcttgtatcatttttgtgctccctctgccaagttccctgtatataaagtatcatcaagattttaagaacattttcttaagcaagcacaggtcttattttgccttctcccagcaatatatatggaactcac

SEQ ID NO: 23932 - DNA, 201 bp, Homo sapiens
cccaggggttcaggtatataaccctccctgaacccagcttctgcgttttcattctcaaggcctctctgagttgaccagatatgataaggtctcttcttgcraagagttacgggggactgtggagtgtgatgagtcatccagaggggccattaagggattatggagacctcggggaaccactgaccagccagggcactcttc

SEQ ID NO: 23933 - DNA, 201 bp, Homo sapiens
agccaccgcgcctggcctttatgtagactttcaatcaattctactgtgttcagcctcatgtgtacccctaccttcagtagttattggtacagtagcccccyttttctagtggggagaccttctaacttccaagatccccagtggatgcctgaagccatagacataccaaatctatagatacagtcagccctccttatccat

SEQ ID NO: 23934 - DNA, 201 bp, Homo sapiens
ggtgcactttcagagaactccttagctgagtcctccaattcacaagttggctcttcagctctgtccatcctgccattgagttttaatttcaacagttatcttttttttttttttttgagacggagtcttgttctgttgcccaggctggagtgcagtggtgtgatctcggctcactgcaagctctgccttccagttcacgcc

SEQ ID NO: 23935 - DNA, 201 bp, Homo sapiens
tgaaaccccatctctactaaaaatacaaaaaaaattagctgggcgtggtggcgggcgcctgtagtcccagctactcgggaggctgaggcaggagaatggcrtgaacctgagagtcagagtttgcagtgagccaagatcgcgccactgcactccagcctgggcgacacagcgagactctgtctcaaacaacaacaacaacaa

SEQ ID NO: 23936 - DNA, 201 bp, Homo sapiens
aattagctgggcgtggtggcgggcgcctgtagtcccagctactcgggaggctgaggcaggagaatggcgtgaacctgagagtcagagtttgcagtgagccragatcgcgccactgcactccagcctgggcgacacagcgagactctgtctcaaacaacaacaacaacaacaacaacaacaacaacaaacatgctggtgaga

SEQ ID NO: 23937 - DNA, 201 bp, Homo sapiens
gcgggcgcctgtagtcccagctactcgggaggctgaggcaggagaatggcgtgaacctgagagtcagagtttgcagtgagccaagatcgcgccactgcacyccagcctgggcgacacagcgagactctgtctcaaacaacaacaacaacaacaacaacaacaacaacaaacatgctggtgagattgcagagaaaagggaat

SEQ ID NO: 23938 - DNA, 201 bp, Homo sapiens
attagcttctcatgagagtcagcttgccctctgaagtttttttttgtgttgtttttgagacagagtctcgctttgtcacccaggctggagtgcagtggcaygattttggctgactgcaacctccgcctcccaggttcaagtgattctcctgcctcagccccccgagcagctgggactacaggcatgtgccaccatgcctgg

SEQ ID NO: 23939 - DNA, 201 bp, Homo sapiens
ggcagcaagcaagagagtgtgtataggggaactgccctttataaaaccatcatatcttgtgagacttattcactatcatgagaacagcttgggaagaaccygcccccatgattcaattacctttcactgggttcctcccatgatacatggggattatgagagctacaattcaagatgagatttgggtggagacacagccaa

SEQ ID NO: 23940 - DNA, 201 bp, Homo sapiens
tgatactgtaggttggtttttgtatcctgcaactttactgaattcatttattagttttagcagtttttttggtggaatctttagggttttctacatataasatcatgttagcaaatgagacaatttaacttcttccttttctatttggatgccatttcattctttttcttgcctaattgctctggctaggccttctagtac

SEQ ID NO: 23941 - DNA, 201 bp, Homo sapiens
tgggtggagacacagccaaaccataccaatacccaaaggaaaataaattgttctaccataaagacacacgcactcatatgttcattgcagcactactcacmatagcaaagacacggaatcaacctaaatgcccatcatcaatacaccagataaagaaaaggtggcacatatacatcgtggaatactgtgcatccataaaaa

SEQ ID NO: 23942 - DNA, 201 bp, Homo sapiens
tgctaactaagcagtcactctccatttctctctcttctcagcacttggcaaccactaatctgctttctgtctctatggatttgcctattctggacatttcwtataaatggaatcattcaatatgtggtcttcggtgtctggcttcctttatttagcataattttgtttgtttgtttgtttgtttgtttttgagacagatcc

SEQ ID NO: 23943 - DNA, 201 bp, Homo sapiens
caacctccgcctcctgggttcaagtgattctcctgcctcagcctcccaagtagctgggactacaggcgtgcgccaccatgcccaggtaatttttgtatttytagtagagatgaggttccaccatgttggtcaggctggtctcgaactcctgacctcatgatctgcccacctcatcctcccaaagtgctgggattacaggca

SEQ ID NO: 23944 - DNA, 201 bp, Homo sapiens
acttgatcatggtgtattattcttttaatggattgttgaattttgtttgctagtattttgttgaggattcttgcatttgtgtttatcagggatattgtctygtatttttcttttcttgtagtgttcttatctggctttgggatcagggtaatgctggtcttgtagaaacagtttagaagtgttccctcctctttaattttt

SEQ ID NO: 23945 - DNA, 201 bp, Homo sapiens
gtgcagcaaaccaccatgggacgtgtatacctatgttaacaaacctgcacgttctccacatatatcccagaacttaatgtataataaaaaattacttttawatttatttatttatttagagacagggtcttgctctgttgcccaggctggagtatagtggtgcaatcacagctcaccacagccttgaccacccaggctcaa

SEQ ID NO: 23946 - DNA, 201 bp, Homo sapiens
cagtatttgaagaggactggggagtcaccattcagtgtgttgcttttgttacattttcttttgttccacagggcacatttacctgatgtccgaagtccagygtccccctctgctctagcagacgataaacttctagtcttctgctggagaggagggagaattgcctgacttagtggatgataaaggaatatgggggccatt

SEQ ID NO: 23947 - DNA, 201 bp, Homo sapiens
tggggagtcaccattcagtgtgttgcttttgttacattttcttttgttccacagggcacatttacctgatgtccgaagtccagcgtccccctctgctctakcagacgataaacttctagtcttctgctggagaggagggagaattgcctgacttagtggatgataaaggaatatgggggccatttgctttttatatggact

SEQ ID NO: 23948 - DNA, 201 bp, Homo sapiens
aacctccaggtgggctctctattctttccccttccttctctctttttttttttttctgattgagacaaagtctcactctgtcaccagactggagtgcagtkgtgtgatctcggctcactgcaacctctgcctcccaggttcaagcgattcttgtgcttcagcctccgagtagctgggactacaggcgtgcaccaccacacc

SEQ ID NO: 23949 - DNA, 201 bp, Homo sapiens
tgccaggggctgtgccccttctccaccgagctcaccagtaccctcaggcaggcagataattccgtggccctgcacccagcggtagcaggggaaaaaggcckcgccttgggtccccgggccctgcactgagatccacttgcagaaccagtcgagactcaacagcacgttgtgtttgcgcagcttcaccatcaggaggcgccc

SEQ ID NO: 23950 - DNA, 201 bp, Homo sapiens
cgagacaagctggctcaagcatttgaagatgcttttgaggtactgaggcaacattcaactggagatcttcaaaacttacctggttttcatcagtgattgtmcccatgtcagaggagattccaactgctatggaatgttgcttacagaggaatctatttataattggagaactttaataaataatgctgcagacttctattt

SEQ ID NO: 23951 - DNA, 201 bp, Homo sapiens
ttacaggataccaggcaacaccaacctcctaagcctcgaacctctctctgccactggctgcttcgtccctgtgctggttctcctcctaacctccaggtggkctctctattctttccccttccttctctctttttttttttttctgattgagacaaagtctcactctgtcaccagactggagtgcagtggtgtgatctcggc

SEQ ID NO: 23952 - DNA, 201 bp, Homo sapiens
aatggtacattgtcatggtgctgataggagtgtcttacggtgatgggcagtgagaggttctttcagcccctctactggtttcggtcagttttgttttgtcttttttttttttttttttgagatggactctctccgtcgctccgactggagtgtagtggtgcggtcttggcccactgcaacctccgcctcttggattcaagt

SEQ ID NO: 23953 - DNA, 201 bp, Homo sapiens
ttacaggcatgagccacggcgcctggcccccttcctcctcctgaaaaggcggatctcaaggctcagtcctgctcttccctccacatcctttgctcttgcargtctcctcttccacgcaggtggctccctcatctcctcttcaatatctgacttctctcaaaagttccaagtctggatttgccattacttgctggacatctc

SEQ ID NO: 23954 - DNA, 201 bp, Homo sapiens
ccttgaattccttgggtcaagggatcctccagccccagtctcccaggtagctaggactacaggtgcaggccaccacacctggctaccattttttttttttwacttttcatagagatgggggtctggctatgttgcccaagctggtcttgaacttctggccccaagcattcctcctgctttgtcctcccaaagtgctaggat

SEQ ID NO: 23955 - DNA, 201 bp, Homo sapiens
caagatcgcgccactgcactccagcctgggcaacaaagcaagactccatctcaaaaaaaaaaaaaaaaaaattcactatttgccatcctcattcctcctcrtctcctgcgggccagtgtgcttcttgtctttcacgggtgtcttccgtgttattccaaccaaaccagctctccagcatcctatgttttcttcccttagctg

SEQ ID NO: 23956 - DNA, 201 bp, Homo sapiens
atcttccagccttttcacacaatttatgaaatccagtgtccccttaatggccaagtccttcaacctgtggaaagaatggagtgcaagaagatcaaggaagmatcccaccttgtgccctaggaagcaagtgcccagcctctacctggtactcacccttttgctagggagacattaaagtctaaatccttatcctcgaggaat

SEQ ID NO: 23957 - DNA, 201 bp, Homo sapiens
taaggacatatgcaagactgggtaatttataaagaaaaagaggtttaatggactcacagttccacatggccagggaggcctcacaatcatggcggaaggtrgagaggagcaaaggcacatcttacatggcagcaagcaagagagtgtgtataggggaactgccctttataaaaccatcatatcttgtgagacttattcact

SEQ ID NO: 23958 - DNA, 201 bp, Homo sapiens
tgcctcccgggttcaagcaattctcctgcctcagcctcctgagtaggtgggattacaggcacccgccaccacgcccagctaatttttttgtattttcagtrgagatggggtttcaccatgttggtcaggctggtctcaaacccctaacctcatgatccacctgccttggcctcccaaagtgctgggattataggcgtgagc

SEQ ID NO: 23959 - DNA, 201 bp, Homo sapiens
cctcccaaagtgctgggattataggcgtgagccaccgtgcccagccaatttttgtatttttagtagagatggagtttcaccatgttggccaggctggtctygaactcctgacctcaggtgatccatccgcctcggcctcccaaagtgctgggattacaggcatgagccacggcgcctggcccccttcctcctcctgaaaag

SEQ ID NO: 23960 - DNA, 201 bp, Homo sapiens
tctactaaaaactacaaaaattagccaggcgcggtggtgggcccccgtaatcccagctacttgggaggctgaggcaggagaatcgcttgaacccgggaggyggaggttgcagtgagctgagatggtgccactgcactcctgcctgggctacagaaagagactccattaaaaaaaaaaagacttcctatattgtcattgtct

SEQ ID NO: 23961 - DNA, 201 bp, Homo sapiens
ccatccccttataaggaaatctgccccatccacagtcagaggtgtacttggatgggaccactccccagacaaaagagcagggtcagtttctcactatgggkgtgtgtgtgtgtgtgtgttgatctggaaaatacagagaggatcaggcagttagcaataggaacaaagacggagagaagccagaggggccaagatggccat

SEQ ID NO: 23962 - DNA, 201 bp, Homo sapiens
tagaataactttgtagttcttgtccatttattttgtgcatgttgttcttaaaaggcttgtgaaagataacttggaatgtgggaaacacatagatcccagartattaaaggggctggaaaagtagccttaagacatgaattatgtgcctttcatctgggactgtttggagaaagaagccattttggggcagtggtttgtatt

SEQ ID NO: 23963 - DNA, 201 bp, Homo sapiens
ccactgcactcctgcctgggctacagaaagagactccattaaaaaaaaaaagacttcctatattgtcattgtctctaataatctccacctctctctctctytctcttttttttttttaccactttcttggaaatttccacctcttctattgaattaaaacttttttttgctattgaacattttctgtcttgttctgtgatt

SEQ ID NO: 23964 - DNA, 201 bp, Homo sapiens
actgcactcctgcctgggctacagaaagagactccattaaaaaaaaaaagacttcctatattgtcattgtctctaataatctccacctctctctctctctctcttttttttttttaccactttcttggaaatttccacctcttctattgaattaaaacttttttttgctattgaacattttctgtcttgttctgtgattgt

SEQ ID NO: 23965 - DNA, 201 bp, Homo sapiens
tcaggccgggtgcggtggctcacgcctgtaatcccagcactttggaaggccgagacgggcggatcacgaggttaggagatcgagaccatcctggctaacayggtgaaaccctgtctctactaaaaatacaaaaaaaattagctgggcgtggtggcgggcacctgtggtcccagctactcgggaggctgaggcaggagaatg

SEQ ID NO: 23966 - DNA, 201 bp, Homo sapiens
aaaaaaaaaaaaaaagaagcaaaaaagaaaactgaaaaaagaggggagcaacaacaactaatataaaatagaataaaatagaatataatagaacaattgtracaatctaactataataaaagttgggtgaatgtggcctttctcaaaatatctgattgtgctgtgctcacctatttttgggctgtggctgactgcaggaaa

SEQ ID NO: 23967 - DNA, 201 bp, Homo sapiens
ctgcactcctgcctgggctacagaaagagactccattaaaaaaaaaaagacttcctatattgtcattgtctctaataatctccacctctctctctctctctcttttttttttttaccactttcttggaaatttccacctcttctattgaattaaaacttttttttgctattgaacattttctgtcttgttctgtgattgtt

SEQ ID NO: 23968 - DNA, 201 bp, Homo sapiens
agcagaatcgattgaacccgggaggcagaggttgcattgagctgaggctgagatcgggcaactgcactccagcctggcgacagagccagactctgtctcaaaaaaaaaaaaaagaaagaaacctgcatatgtatccccaaatctaaaataaaaattgaaaaaaaaaaaaagggctgggtgcagtgggtgcagtagttcact

SEQ ID NO: 23969 - DNA, 201 bp, Homo sapiens
tgcaagcatttgacttttaactttccctggtctgctgaattgattaccccttgtttatctgctttcagcttccaaaatatagatgccatttctttctttctttctttttttttttttttcttgagacggagtttcgctcttgttgcccaggctgggatgcaatggtgtgatctcggctcattgtaacctccgcctcctggg

SEQ ID NO: 23970 - DNA, 201 bp, Homo sapiens
ccccagctctcaccgcagtccgcgctcacctttccccacaccggtggcagctgcttccctaggtctgcctccccgtgctcgcccaccagccatagctgcascaggttgggagagcccgccaggagcaaatccccggtggctacgcggaccgtgtacttgcccatcttgcccggagatccggggagaaatcagctttaaaag

SEQ ID NO: 23971 - DNA, 201 bp, Homo sapiens
tgcactcctgcctgggctacagaaagagactccattaaaaaaaaaaagacttcctatattgtcattgtctctaataatctccacctctctctctctctctyttttttttttttaccactttcttggaaatttccacctcttctattgaattaaaacttttttttgctattgaacattttctgtcttgttctgtgattgttg

SEQ ID NO: 23972 - DNA, 201 bp, Homo sapiens
aagcatttgacttttaactttccctggtctgctgaattgattaccccttgtttatctgctttcagcttccaaaatatagatgccatttctttctttctttytttttttttttttttcttgagacggagtttcgctcttgttgcccaggctgggatgcaatggtgtgatctcggctcattgtaacctccgcctcctgggttc

SEQ ID NO: 23973 - DNA, 201 bp, Homo sapiens
tgtatatgcatatcacagtttctttatccacttgttgattgatgggcattttggttggttccacagtttcgcaattgcgaattgtgctgctataaacatgygtgtgcaagtaccttttttgtataatgacttcttttcctctgggtagatgcccagtagtgggattgctggatcgaatggtagttctacttttagttctct

SEQ ID NO: 23974 - DNA, 201 bp, Homo sapiens
ggaaatttccacctcttctattgaattaaaacttttttttgctattgaacattttctgtcttgttctgtgattgttgctttcagaaaacatcctgcttttrtttcaaagatgctaatcttctctagtatttctgaacatagtaaatatagtttaaaaaatctgtttcttcattattcctattttctctgagtccctctttt

SEQ ID NO: 23975 - DNA, 201 bp, Homo sapiens
ctgaggcagagaattgcttgaacctgggaggtggaggttgcagtgagctgagatcaggccactgcactccagcctgggtgagacagcgagactccatctcaaaaaaaaaaaaaaaaaaaattccgtttatccactgtatgcctcttaatgagagaatttagtctatatacatttaaagtaataattgataggtaaggactt

SEQ ID NO: 23976 - DNA, 201 bp, Homo sapiens
tgaggcagagaattgcttgaacctgggaggtggaggttgcagtgagctgagatcaggccactgcactccagcctgggtgagacagcgagactccatctcaaaaaaaaaaaaaaaaaaaattccgtttatccactgtatgcctcttaatgagagaatttagtctatatacatttaaagtaataattgataggtaaggactta

SEQ ID NO: 23977 - DNA, 201 bp, Homo sapiens
aacatagcatgtattacaagaaaaatattttcatattagattacaaagaaaaacccaactgtctactatacacaaaaggtacatttaaaataaactaattctggaagttgaaaataaaaggatgggcaaatgtataacagacaaaaaaagtatcactcataatcttaaaattagatattataggccaggcaccgtggctga

SEQ ID NO: 23978 - DNA, 201 bp, Homo sapiens
cccattctgtaatatccaaataaaatggctcaaattcccatcctgcctaatagtaggatctggcctttccacacacattttcgtgggttacttttgcctagaaaagagtttgtctcatacctacttccaaaagcactgtttctttgctgttttgtgacttattttctgcccactctagtgtactctacggccacgtgcaga

SEQ ID NO: 23979 - DNA, 201 bp, Homo sapiens
aggcatttgcttctcaccatgacaggctggcgtctgccaaggaactttgtgaaggtcttttgcatacgtgcctggtggagattgggcagtaagtccactakatccttctctgtcacatccttagagatgggcgggggcttctgcatggtgcatgggccattagggatccaggagtaccagtccagctgcagggaggagagc

SEQ ID NO: 23980 - DNA, 201 bp, Homo sapiens
gagaggtcgggaagtggaaaatcagtagggatgcaccataggaggtggtgattggaggcaggggaagtgcaggtttaggagtcagagggagccgcattcaytcaacaaatatagaagagaagggagaagagtgcaaagaccctgaggtgagaaccagcttgtcattttcagggaatagactgaaggtcaggagctatagtg

SEQ ID NO: 23981 - DNA, 201 bp, Homo sapiens
tgaggcaggagaatggcatgaacccagaaggcggagcttgcagtgagcccagatcgcgccactgcactccagcctgggcgacagagctaggctccgtttcaaaaaaaaaaaaaaaaaaaccttaggagagtcggagaaacagagagcagggagagaaatagagggaattcagtccacggaaaagtgtgatctatggcagca

SEQ ID NO: 23982 - DNA, 201 bp, Homo sapiens
agccctaagtcggtacctgactcagcccaggaagtcagggaggacttcttggaggaggagctgtgtgagctgagctctgaaggaagagctgggtgggcatrtcgggaagcggacattagtggcagggaaatggcatgcgcagaggcctgaggtgagggtaaggggggatggaacattggaggaacaggatgagagtcagca

SEQ ID NO: 23983 - DNA, 201 bp, Homo sapiens
aggagaatcacttgcatccggggggcaaaggttgcagtgagccaagatcacgccactgcacttcagcctgggcgacagagcaaaactccatctcaatcagtctcaatcaatcaatcaatcaatcaataaaagacatgtagggccgggcacagtggctcacgcctgtaatcccaacactttgggaggccaaggtgggcggat

SEQ ID NO: 23984 - DNA, 201 bp, Homo sapiens
aagggtcaggaaaggaatggggcaggcccaggcagaagggtcaggggtgggatggggacccaggcagagggttggggccaggatgaggaagcacaagcagwggggtcagggccaggatagggggccacaagaagctgtgggagccctaagtcggtacctgactcagcccaggaagtcagggaggacttcttggaggaggag

SEQ ID NO: 23985 - DNA, 201 bp, Homo sapiens
ggagaatcacttgcatccggggggcaaaggttgcagtgagccaagatcacgccactgcacttcagcctgggcgacagagcaaaactccatctcaatcagtctcaatcaatcaatcaatcaatcaataaaagacatgtagggccgggcacagtggctcacgcctgtaatcccaacactttgggaggccaaggtgggcggatc

SEQ ID NO: 23986 - DNA, 201 bp, Homo sapiens; identical to SEQ ID NO: 14983

SEQ ID NO: 23987 - DNA, 201 bp, Homo sapiens
gaggttgcagtggttgcagtgagccgagatcatgccactgcaccccagcctgggagacaagagtgagattcctactcaaaaaaaaaaaaaaaaaaaaaaawagaaaaaggaaaaagacacataggttaaggcaggagaatcacttgagcccaggagttggagaccagcctcggcaacctagcaaagccccatctttacaaa

SEQ ID NO: 23988 - DNA, 201 bp, Homo sapiens
caaagtgctgggattacaggcctgagccactgtgccctgccaatcctgtctccttttgatgcagccactgggtctttctaacacacatatctgctcctgtygctccctttttcaaaaccatccatgcatctcagggccccaggacacaaatgaactcctcagcctggtgtttgaccctctgcagggactggcccctgccag

SEQ ID NO: 23989 - DNA, 201 bp, Homo sapiens
tgagggtggtggacgaagctggggtcctgggtctgggcccagggaggatgcggcctgtgggaatgggcggggctttgtagatcagggggcggggtctggtrtgatggaggcaggacctaagtggatgctgggaggggtttagtgggtctgaggctgagcttaatcgatttaggtggagcctgagggtctggtgcgtgggtt

SEQ ID NO: 23990 - DNA, 201 bp, Homo sapiens
caggtgatccacccgcctcggtctcccaaagtgctgggattacaggtgtgagccactgcgcccggcctcagaacgttttcattactctcagaggtgccatrcttatactgctttgtaccttatacctttgtacccatatttattaagcagtcactctccatttcccccaacccctagcaaccaccaatttgttttctgtct

SEQ ID NO: 23991 - DNA, 201 bp, Homo sapiens
gggagatgcaggtaccctcagcacaagccccaaattacctgcaggggagaggcggaaaatcagacaatgtagaaaccgggagaagaaaggtatggacagaycgatgcagataggaggggaaggaaatacctggaaatgagatagagaccggctggacagaccccggggaccctgcaggtcaccacacccttctctttcagc

SEQ ID NO: 23992 - DNA, 201 bp, Homo sapiens
tgagtcagagggtggtaggaggtgaagaggaacaagggctatatcgtagtccttgtttaaatagctttcaagagactttagcgacaaaatagctaagatcygggactctggagcccttggcctaggtttgaatctcacttctgcccagctgtgtcactttgggcaagtcagttaacctttctggcctgttacctcatccgg

SEQ ID NO: 23993 - DNA, 201 bp, Homo sapiens
ctccttttgatgcagccactgggtctttctaacacacatatctgctcctgtcgctccctttttcaaaaccatccatgcatctcagggccccaggacacaamtgaactcctcagcctggtgtttgaccctctgcagggactggcccctgccagcccagccttaccggcctcagccacttgtcggtctccctacctctcaggc

SEQ ID NO: 23994 - DNA, 201 bp, Homo sapiens
tctccttttgatgcagccactgggtctttctaacacacatatctgctcctgtcgctccctttttcaaaaccatccatgcatctcagggccccaggacacaratgaactcctcagcctggtgtttgaccctctgcagggactggcccctgccagcccagccttaccggcctcagccacttgtcggtctccctacctctcagg

SEQ ID NO: 23995 - DNA, 201 bp, Homo sapiens; identical to SEQ ID NO: 14986

SEQ ID NO: 23996 - DNA, 201 bp, Homo sapiens
tttttcagaaatgggatttctactgccagtgagctcagcctaccgctggccctgccgtttcccctccttgggtttatgcaaatacaatcagcccagtgcaracggctcgtctccgtggtctttggggtggggtagggtagggtggggactgtacaaatgaaatgtttctctaggttgctgaatctaaccaattaacccgct

SEQ ID NO: 23997 - DNA, 201 bp, Homo sapiens
aaggcacatttttgaatacaggagatgggatggggtagatccttgagtaacaggtactggtgttaaggggagtgcagcatactgacaacccacaccaaaargtttgcaagggccaaccacaatggctcacacctgtaatcccagcattttgggaggccaaggtaggagcatcacttgagatcaggagttttagaccagcct

SEQ ID NO: 23998 - DNA, 201 bp, Homo sapiens
tagcttttaactcctcttccccaggttcagggagattactatggagatctggctgctcgcctgggctatttccccagtagcattgtccgagaggaccagaycctgaaacctggcaaagtcgatgtgaagacagacgtgagtgtcatgggggctggcaagaaatgtggggggaggacccttaggttgtggggatgggcaaaa

SEQ ID NO: 23999 - DNA, 201 bp, Homo sapiens
agtggtgtatgtcttctccaagctgaagggccgtgggcggctcttctggggaggcagcgtgagtcttgggagagtgaaagagggaagggtacagagctggrgtagactcattatccccatgaagggaagatttgaggggggtgaactgaaatagacattgtggggggatattgttacttactttattttatttgcttatta

SEQ ID NO: 24000 - DNA, 201 bp, Homo sapiens
ccaagttgggaggatagcttgagcccaggagttcgagaccagcctgggcaacatagcaagacccccatctctataaaaaaaaatttaaaattaactgggcwtcatggcatgtgtctgtggtcccggctactcgggaggctgaggtgggaggattgcttgatcccagaagttgaggctgcagtgagccgtgatcatgctact

SEQ ID NO: 24001 - DNA, 201 bp, Homo sapiens
gaaaacctaagcagcccaactaggggattgtagtgtcctctctagaccagtgggagggagccaatcggactacgcggaggatataaatcgcacagtaaagrttttcttggaagattatctggaaagggaggtgggaagtaacctgcgcctatctgcccagttttcctccttttcgcctttgagaacagtaatcgctcccgc

SEQ ID NO: 24002 - DNA, 201 bp, Homo sapiens
aacacactgtaggtcttcaggaaatgcctgcagagcagaaaagttgatagacacatagaaaccttaggagaggccgggcgtggtggctcatgcctgtaatyccagcattttgggaggccgaggcgggcggatcacgaggtcaggagatcgagaccatcctggctaacatggtgaaaccccgtctctactaaaaatacaaaa

SEQ ID NO: 24003 - DNA, 201 bp, Homo sapiens
cgactctgccccccgtactccagactaaatccgttcctcggctcagctaagcagctctgcacgtcccttcccacttgctcagccaatcgctgggctcggcyccgcccctttgggcttggtccttctcacgccaccaatccgcgcctcttgtcccgccccctgcccgcgagtccgccaatcccgcccttcggaaagcgtcgc

SEQ ID NO: 24004 - DNA, 201 bp, Homo sapiens
aacagaaagagagacagtgagaaatagggaactgaagacacacacgccaaggcaggagaaccgcttgagtccaggagtttgagaccagcctgggcaacatygtgaaatcccatctttccaaaagagagatggagaaatggacgtgttgtgggagagagagagagagaaatgcgtagggctcaacacactgtaggtcttcag

SEQ ID NO: 24005 - DNA, 201 bp, Homo sapiens; identical to SEQ ID NO: 14990

SEQ ID NO: 24006 - DNA, 201 bp, Homo sapiens
aggcaggcggatcacctgaggtcgggagtttgagaccagcctgaccaacatggagaaaccccgtctctactaaaaatacagaattagctgagtgtggtggygcatgcctgtaatcccagctactcgggaggctgaggcaggagaattgcttgaacctgggaggtggaggttgcggtgagccgagatcgcgccattgcactc

SEQ ID NO: 24007 - DNA, 201 bp, Homo sapiens
ctgggcccagggaggatgcggcctgtgggaatgggcggggctttgtagatcagggggcggggtctggtgtgatggaggcaggacctaagtggatgctgggwggggtttagtgggtctgaggctgagcttaatcgatttaggtggagcctgagggtctggtgcgtgggttaaatagatctggggcgggatttgagggagctg

SEQ ID NO: 24008 - DNA, 201 bp, Homo sapiens
ccctatccttgaaatggttctggtttcatagcaacttctaggtggtgtgggcgaagtttgggactggtttagggcggggacaagaccaagaacacaagttyccttgtactacgggagagagggaggggaggaaattggagaccccagcacccccttgctcactctcttgctcacagtccacgatggcccggtccctggtgt

SEQ ID NO: 24009 - DNA, 201 bp, Homo sapiens
aggaagagctgggtgggcatatcgggaagcggacattagtggcagggaaatggcatgcgcagaggcctgaggtgagggtaaggggggatggaacattggargaacaggatgagagtcagcaggtgagagctcagtggagggtggggactaactggggccctgacctcagagtgtgtgcccctgcagagctgatgttcctgg

SEQ ID NO: 24010 - DNA, 201 bp, Homo sapiens
ggaggcttctgaacagaggaaggacaggatcagattcaggggtgcagagagttcctctggctgcataaagggaaggggctgtgagggacagaggaggtcascaggacaccagagaggaagctgctgcaaagtccagggaagatggtggaggacaggacaagggggcgggaagaggagtggctgagaagggaatagggttca

SEQ ID NO: 24011 - DNA, 201 bp, Homo sapiens
gtcatcatggaggacctgtgtgtgttttgtgggtacagcatgagatggggtcaggggttggaggaagcagatcagttagggcctgtgggccctggggaggsctctggcttataccctgtgtgggagccatgggaggcttctgaacagaggaaggacaggatcagattcaggggtgcagagagttcctctggctgcataaag

SEQ ID NO: 24012 - DNA, 201 bp, Homo sapiens
aaaaaaaaaagaaagaaaggtcaggaccagatggggaggcactgggggagaggggtcagagccagcaggggagaggcccaggggggtcagggccagggtcrgggcacaggcagagggatcagggtgggatagggcaggcagaggcagaggggtcaggtgggatgaggggacacaggcagaggggttgcatttgatgggggg

SEQ ID NO: 24013 - DNA, 201 bp, Homo sapiens
ggttttctttccactgtttcccctttctctttttcagaaatgggatttctactgccagtgagctcagcctaccgctggccctgccgtttcccctccttggstttatgcaaatacaatcagcccagtgcaaacggctcgtctccgtggtctttggggtggggtagggtagggtggggactgtacaaatgaaatgtttctcta

SEQ ID NO: 24014 - DNA, 201 bp, Homo sapiens
gagaggcgaagagagagggacttcaaggatgcaagaagagagaggaattgcatggtgacccgaccaaggccaggttttgggggatgggccagcagtgaagkggggggcctccgaaccaccagtctgtctctgtagaggggggcattctcggggcagaccccagccttgggggtgactgggtccccctggccccacaggtca

SEQ ID NO: 24015 - DNA, 201 bp, Homo sapiens
tctccttcatcagttcattgagaataagtgtgagtttcccgcagtggtcctgggaaccctgagctgtgtttatgcgcatggtgtgggctggtgggcagccrgtggggagggcagggctggccataggtacaagtccagtgctggctttttggtccttgctttgtcgtatgtcctttactaggttctccttgacctcaagtc

SEQ ID NO: 24016 - DNA, 201 bp, Homo sapiens
gggcttgggcgttagcctgtgtggagggtgctgcattcccttctattccttccctagaccctatctccatggctgtggcccttcaggactacatggccccygactgccgattcctgaccattcaccggggccaagtggtgtatgtcttctccaagctgaagggccgtgggcggctcttctggggaggcagcgtgagtcttg

SEQ ID NO: 24017 - DNA, 201 bp, Homo sapiens
ggttgcagtggttgcagtgagccgagatcatgccactgcaccccagcctgggagacaagagtgagattcctactcaaaaaaaaaaaaaaaaaaaaaaaaaraaaaaggaaaaagacacataggttaaggcaggagaatcacttgagcccaggagttggagaccagcctcggcaacctagcaaagccccatctttacaaaaa

SEQ ID NO: 24018 - DNA, 201 bp, Homo sapiens
catcagagaggtgtgggtgtgaattcagctctgattttctgactgtggggccttgtcatgctgctgatgggtagactctggttggcctgttcctgtcctaratggtgctagagacacagtgttggagacagccctaggcccaaccttcatggagctcacagttcagtgggtgagggtggaaggacagacccacttccagac

SEQ ID NO: 24019 - DNA, 201 bp, Homo sapiens
ggtgactgggtccccctggccccacaggtcagtgacgcggagttattaccgaggggcggctggagccctgctggtgtacgacatcaccaggtgggtgcccrgggtgggtggggtagggcatgggtggttcctctcctgcactgcctccctcccttctcccttctccacagccgggagacatacaactcactggctgcctgg

SEQ ID NO: 24020 - DNA, 201 bp, Homo sapiens
ctggtgggcagccggtggggagggcagggctggccataggtacaagtccagtgctggctttttggtccttgctttgtcgtatgtcctttactaggttctcsttgacctcaagtcactccagcaaggagaatgggtttgtagagactgagagggccttggaggatgggggatcctctgagctgtctcctctctccctgtact

SEQ ID NO: 24021 - DNA, 201 bp, Homo sapiens
ctgcgacctccgcctcccgggttcaagtgagtctcctgcctcagcctcccaagtagctgggattacaggcatgtactgccacaaccagctaatttttgtattttttttttttttttggagatggagtctcgctttgttgcccaggctggagtgcagtggtgcagtctcggctcactgcaacctccgcctcctgggttcagg

SEQ ID NO: 24022 - DNA, 201 bp, Homo sapiens
gccaagatcgtaccactgcactccagcctgggctacagagcaagaccatcaaaaaaataaaaaataagacacacatgaaagagacacagagagaaaaacasacgaatggaaagatagggacacagggagagacaaaaatggagattcataaatagagacagctggccagctaagtgagatagaagctgagagaggcgaaga

SEQ ID NO: 24023 - DNA, 201 bp, Homo sapiens
ggttttagtgagccgagatcgcaccactgcactccagcctgggcgacagagctagactccgtctcacaaaaacaaaaacaaacaaaccaaaaaaaccaaamcaaaacaaaaaaactcctggcctcaagcaatcctccacctcagcctcccaaagtgctaagattacaggcatgagccaccgagcccagccaaccaatataa

SEQ ID NO: 24024 - DNA, 201 bp, Homo sapiens
tggtccttgctttgtcgtatgtcctttactaggttctccttgacctcaagtcactccagcaaggagaatgggtttgtagagactgagagggccttggaggrtgggggatcctctgagctgtctcctctctccctgtactgccccttctgttcctcctactcccagtcaaacaggactccaaccacacaatcggcgtggagt

SEQ ID NO: 24025 - DNA, 201 bp, Homo sapiens; identical to SEQ ID NO: 15006

SEQ ID NO: 24026 - DNA, 201 bp, Homo sapiens
ccttgggcttacagcctttaccctatccttgaaatggttctggtttcatagcaacttctaggtggtgtgggcgaagtttgggactggtttagggcggggayaagaccaagaacacaagtttccttgtactacgggagagagggaggggaggaaattggagaccccagcacccccttgctcactctcttgctcacagtccac

SEQ ID NO: 24027 - DNA, 201 bp, Homo sapiens
ttcaaaaccctgcaggatttggtcccatccctccttctctgggggatgtgtatgtcttgccagttctcccttctatacttcatgctaaatcccctcccagsccttggcagctccagggtgggacaggtggggaacaagtggttagaccttggatctacttggaaggcagagccaacgtgatttcctgatggaatggatgtg

SEQ ID NO: 24028 - DNA, 201 bp, Homo sapiens
caaatgaatgggtgtgtcttcttcacctcagggcttagcagagactctgtcctagagagtttgccctcagtaggtgaaatgtaacaaggcaaggcaaggcyttttcacactttgctgactgcaatctacaggaggaaatatattttatgtgttaatcaaggactgactgtagcagatcccacccacatataaaactcaaac

SEQ ID NO: 24029 - DNA, 201 bp, Homo sapiens
gtctccttcatcagttcattgagaataagtgtgagtttcccgcagtggtcctgggaaccctgagctgtgtttatgcgcatggtgtgggctggtgggcagcyggtggggagggcagggctggccataggtacaagtccagtgctggctttttggtccttgctttgtcgtatgtcctttactaggttctccttgacctcaagt

SEQ ID NO: 24030 - DNA, 201 bp, Homo sapiens
tgttcctggagaccagcgctctcacaggcgagaacgtggaggaggcgttcctcaagtgtgcccgcactatcctcaacaagattgactcaggtgaggccccraccggcccgagtgggagcgaagggcaggcccgggggtctccaggcaaccaatgctgacctctccccttccccacaggcgagctagacccggagaggatgg

SEQ ID NO: 24031 - DNA, 201 bp, Homo sapiens
agcaggtgagagctcagtggagggtggggactaactggggccctgacctcagagtgtgtgcccctgcagagctgatgttcctggagaccagcgctctcacwggcgagaacgtggaggaggcgttcctcaagtgtgcccgcactatcctcaacaagattgactcaggtgaggccccgaccggcccgagtgggagcgaagggc

SEQ ID NO: 24032 - DNA, 201 bp, Homo sapiens
tatatgatgcactctggtatttgccgttctgtgctattctgtttgaatttaaaaattggtcaagacccaccaaactgatttccccaccaaggcagtgacayacattagaatgacctggagaattttaaaagatactgatgcccaggcctcaccctagagattctgaagtggtttcaggactttttcttaattaaaagataa

SEQ ID NO: 24033 - DNA, 201 bp, Homo sapiens
tgtgagctgttgatgtgagtaaagacctttagaactgttcctggcccacaacaacacacaattgacccatgtaacaaacctgcacatgtgggctgggcgcrgtggctcatgcctgtaatcccagcactttgggaggctgaggcaggcggatcacctgaggtcgggagtttgagaccagcctgaccaacatggagaaacccc

SEQ ID NO: 24034 - DNA, 201 bp, Homo sapiens
cccccttgctcactctcttgctcacagtccacgatggcccggtccctggtgtgccttggtgtcatcatcttgctgtctgccttctccggacctggtgtcaggggtggtcctatgcccaagctggctgaccggaagctgtgtgcggaccaggagtgcagccgtaagaatggggaggggagaattgggggcttgggcgttagc

SEQ ID NO: 24035 - DNA, 201 bp, Homo sapiens
gaattgaggggcacgcaggattctgagcaccaggggcagaggcggccagacaacctcagggaggagtgtcctggcgtccccatcctccaaagggcctgggmccgccccgagggggcagcgagaggagcttccccatccccggtcagtccaccctgccccgtccactttcccatctcctcggtataaatcatgtttataagt

SEQ ID NO: 24036 - DNA, 201 bp, Homo sapiens
tgaggcccaaggtcacggtgtcagcaaggtgtcagcaaggttccttgggtatgggacccaaagcctccggatcccagcctggagcaattagagtagtagtrgtggtggagatttatggagttctgttctggtgttcattatacgttaactcattagatccttgggacaattctgtgtggtgagggtcccatctttcagatg

SEQ ID NO: 24037 - DNA, 201 bp, Homo sapiens; identical to SEQ ID NO: 16050

SEQ ID NO: 24038 - DNA, 201 bp, Homo sapiens
ttcagagggcaggggtcactgagcggagagcagaggaggagtgagccatttgctccagcgtgaagttgttggtgtgatggggtttcagggtggcaggagcwgtgtggttaaaggtctggaagctgtcggcatgtggctggtatccaaggtggccaggaactctgcatggatatggtgggaagctggcacgcctctcacctc

SEQ ID NO: 24039 - DNA, 201 bp, Homo sapiens
tttagggacctgaggagccccgggatcagccaagccagacttctcttgtgatcgggaaggcaactgaggcccaaggtcacggtgtcagcaaggtgtcagcraggttccttgggtatgggacccaaagcctccggatcccagcctggagcaattagagtagtagtagtggtggagatttatggagttctgttctggtgttca

SEQ ID NO: 24040 - DNA, 201 bp, Homo sapiens
cttttcagagggcaggggtcactgagcggagagcagaggaggagtgagccatttgctccagcgtgaagttgttggtgtgatggggtttcagggtggcaggmgcagtgtggttaaaggtctggaagctgtcggcatgtggctggtatccaaggtggccaggaactctgcatggatatggtgggaagctggcacgcctctcac

SEQ ID NO: 24041 - DNA, 201 bp, Homo sapiens
gtcactgagcggagagcagaggaggagtgagccatttgctccagcgtgaagttgttggtgtgatggggtttcagggtggcaggagcagtgtggttaaaggyctggaagctgtcggcatgtggctggtatccaaggtggccaggaactctgcatggatatggtgggaagctggcacgcctctcacctcagctcttccctgca

SEQ ID NO: 24042 - DNA, 201 bp, Homo sapiens
tggtagtgattttttttttcttttcttcccctgccccacctcacatacctctgccctgagacgcagtctctgttgcccaggccagagtgcagtggcacagkgtcagctcacctcaacctccaccttctgggttcaagtgattctcctgtctcagcctcccaagtagctgggattacaggcacgcactgccacacccggcta

SEQ ID NO: 24043 - DNA, 201 bp, Homo sapiens
tcctgaatcaccgcaagaacaagtttcagtgtggctttggcctcaccatcggctgagccctcctggcccccgccttccacgcccttccgattccacctccrcctccacctccccctgccacagaggggagacctgagcccccctcccttccctccccccttgggggtcgggggggacattggaaaggagggaccccgccac

SEQ ID NO: 24044 - DNA, 201 bp, Homo sapiens
ttctggatgttgtttgaaggcagagctgccaggatttgttgagaccggatggaggcgatgactctgtagtttttggctggaactggaaggatggagtttcrgattgccagctttgtgtctttgtgcagccatccactgtgtcgtggagagcaggctcttgagcgctgagtcctgagtgaatgactcgtgcaggcggggagg

SEQ ID NO: 24045 - DNA, 201 bp, Homo sapiens
gggattctggaactgaatggcgcttcgggattctgagtagcaggggcagcatgcccagtgggcctggggtcccgggagggattccagaattgaggggcacrcaggattctgagcaccaggggcagaggcggccagacaacctcagggaggagtgtcctggcgtccccatcctccaaagggcctgggcccgccccgaggggg

SEQ ID NO: 24046 - DNA, 201 bp, Homo sapiens
gagcaccaggggcagaggcggccagacaacctcagggaggagtgtcctggcgtccccatcctccaaagggcctgggcccgccccgagggggcagcgagagsagcttccccatccccggtcagtccaccctgccccgtccactttcccatctcctcggtataaatcatgtttataagttatggaagaaccgggacattttac

SEQ ID NO: 24047 - DNA, 201 bp, Homo sapiens
tggggctttcggaaaccaaggcatagcttctcacaggaccctgcagctggcgtagagagcagactccaaagggggtaccactgggagggagtggacggggrgaggaggttggattctggatgttgtttgaaggcagagctgccaggatttgttgagaccggatggaggcgatgactctgtagtttttggctggaactggaa

SEQ ID NO: 24048 - DNA, 201 bp, Homo sapiens; identical to SEQ ID NO: 16059

SEQ ID NO: 24049 - DNA, 201 bp, Homo sapiens
tcacccgtggggcaggggacagactgttcccagagagtaacaagccaggatgggcaaggctgacatgggggaacccaaaggtcggggagcctaactcagcytaggtggtcagagagcacttcgtggaggaggggacccccatccgaggctttctgaccctaggcttctcaccccggcccatctcacatacttgcacagtgc

SEQ ID NO: 24050 - DNA, 201 bp, Homo sapiens
gagactccatctcaaaaaaaaaaaaaaaaaattaaatttcttattttttgaaacaggatctctgttgcccacgttggagtgcagtggcgtgatcatagctyagtgtaaccttgaccttctgagctcaagtgatcctcctgcctcagcctcccaagtagctgggactataagcatgtgccatcatgcctggctacgttttta

SEQ ID NO: 24051 - DNA, 201 bp, Homo sapiens
caggttcccgctgtagaaatctctggggcatctctggggtggccatgtgggggctagttattaggaagggcaaaactggaggcccagacagggttgggggkactgaatgaggtctctgcttctgtcatttcccttcagcaaatgtgtttattctgcaaaccttcattgcacaacacattctgtgcccagccctgtgctggc

SEQ ID NO: 24052 - DNA, 201 bp, Homo sapiens
gggtctctggagagagctgggggtggtagggaaggaagagatgagagttggtgtggggttggagtggagtgtgacagcgtttctcttctccagagctgttwcccattcagatggagggtgtcaagctcacagtcaacaaagggttgagtaaccattttcaggtgagccttcctggtgtccttacccaccagagatcgtccc

SEQ ID NO: 24053 - DNA, 201 bp, Homo sapiens
tctcactctgtcactcaggctggagtgcagtggcactatcatggctcactgcagcctccacctcctgggcttaagcaatcctcccacgtccacccccttastacctgggactacaggtgtgcaccacctcacccaactaatttttgtattcgctatgtttcccaagctggtttcgaattcctgggctcaaatgaacccact

SEQ ID NO: 24054 - DNA, 201 bp, Homo sapiens
ttcccaagctggtttcgaattcctgggctcaaatgaacccactttggcctcccaaactgctgggattacaacaagcatgagccactgtgcctggccttgatttttttttttttttatgataatctgtagttagatgaagtttttaaattttttgtagagatggggtctcactatgtcacctaggcttgtctccaactgctg

SEQ ID NO: 24055 - DNA, 201 bp, Homo sapiens
tgggcaagcctatctgtccagtatcgtcacagctctcgctttccttccaggtcaaccacacagtagccctcagcacaatcggggagtccaactaccacttyggggtcacatatgtggggacaaagcagctgagtcccacagaggtgagcttcctttttcatccattcattgtatccttctaataacaaatttgtagccaaa

SEQ ID NO: 24056 - DNA, 201 bp, Homo sapiens
acagagcgagactccatctcaaaaaaaaaaaaaaaaaattaaatttcttattttttgaaacaggatctctgttgcccacgttggagtgcagtggcgtgatyatagctcagtgtaaccttgaccttctgagctcaagtgatcctcctgcctcagcctcccaagtagctgggactataagcatgtgccatcatgcctggctac

SEQ ID NO: 24057 - DNA, 201 bp, Homo sapiens
aagctggagctttgtccatcccctcttatttttctgcacttgactctcttatttttctgagactggtctccctctgtcgcccaggctagagtgcagcagtscaactgcggctcactgcagcctccacctcccgggctcaagcagccttcccacctcagcctcctgagtagctaggaccacaggtgtatgccaccaggccca

SEQ ID NO: 24058 - DNA, 201 bp, Homo sapiens
caggggccgccgaggatggggcctgcggctgcctgcccaacccgggcacattcgaggagtgccaccggaagtgcaagggtgaggggcgaggggcccccgckgggctgcgatggcctggatctcgggggaagggggaggacactggggactctgggatttggcgcgcaccattggaattatttaacagcactaggaggtgat

SEQ ID NO: 24059 - DNA, 201 bp, Homo sapiens
ccagcctgggtgacagagcaagactccatctcaaaaaaaaaaaagtaggtggacaaccctctactatgttttatgcttggaaaaaaaaagtaggtagagcrgccaggcgtggtgactcacgcctgtaatcccagcattttgggaggccaagccaggtagaatacttgaggccaggagttggagaccagcctggccaacgtg

SEQ ID NO: 24060 - DNA, 201 bp, Homo sapiens
ctatagtcccaactactgaggctgaggcgggaaaatggtatgaacccaggaggcggagcttgcggtgagccgagatcgtgccaccgcactccagcctgggygacagagcaagactccatctcaaaaaaaaaaaagtaggtggacaaccctctactatgttttatgcttggaaaaaaaaagtaggtagagcagccaggcgtg

SEQ ID NO: 24061 - DNA, 201 bp, Homo sapiens
cgcaacatactaccacaaagccagtgaccaggtgagtgggtgcagggactagctggtgctgccaggggctgctgggcctggaagtccaggtggggccactygctaattctcatgtgttgctccggcccctccagctgcaggtgggtgtggagtttgaggccagcacaaggatgcaggacaccagcgtctccttcgggtacc

SEQ ID NO: 24062 - DNA, 201 bp, Homo sapiens
cggtagggaacccctgggcgatgggttaggagaagggagcccttgagggaggcctgagagcaagcccaagcctccagccggggtgagcctagagggcttcytggaggtggagtctagcctggcactcagggtgggtggaaactgatcgtcattttgcccacaggaatcctcgtagcccactacctccagagcatcacgcct

SEQ ID NO: 24063 - DNA, 201 bp, Homo sapiens
ttgtgtcgaccagatgaggtccttcaggtaatgcagtcatagcagggcctgggacgctgacctcagcggtagggaacccctgggcgatgggttaggagaarggagcccttgagggaggcctgagagcaagcccaagcctccagccggggtgagcctagagggcttcctggaggtggagtctagcctggcactcagggtggg

SEQ ID NO: 24064 - DNA, 201 bp, Homo sapiens
ccagcagctgaggaggggattctggaactgaatggcgcttcgggattctgagtagcaggggcagcatgcccagtgggcctggggtcccgggagggattccrgaattgaggggcacgcaggattctgagcaccaggggcagaggcggccagacaacctcagggaggagtgtcctggcgtccccatcctccaaagggcctggg

SEQ ID NO: 24065 - DNA, 201 bp, Homo sapiens; identical to SEQ ID NO: 16074

SEQ ID NO: 24066 - DNA, 201 bp, Homo sapiens
gtcccacagaggtgagcttcctttttcatccattcattgtatccttctaataacaaatttgtagccaaatgtcaagctaagacggcctcatcaggaaaagrtcacagctaccgagagcctggagatggggattgcatctctccgaggtgcactgggacacaaataattccttcatccagcaaacatccgccaaacccctgc

SEQ ID NO: 24067 - DNA, 201 bp, Homo sapiens
gggaggagtgtcctggcgtccccatcctccaaagggcctgggcccgccccgagggggcagcgagaggagcttccccatccccggtcagtccaccctgcccygtccactttcccatctcctcggtataaatcatgtttataagttatggaagaaccgggacattttacagaaaaaaaacaaaaaacaacaaaaaatatacgt

SEQ ID NO: 24068 - DNA, 201 bp, Homo sapiens
gccactggagaagtggctcagcaggagtgattttgaaacatcaggcaacatactacagtgggtgagacggtcacccactgaccatgagtgggtgagtcagmgcagtcttttttttttttttttttgagatggagtcttgctttatcacccaggttggagtgccgtggcacgatcttggctcactgcaacctccatctcctg

SEQ ID NO: 24069 - DNA, 201 bp, Homo sapiens
gcgcaattttaactgagattttcttttgtattaaaaaatgttttaagatggggtcttgctgtattggccaggctggtcttggaactcctggcttcaagcartcctcccaccttgaccttccaaagtgctgggatgacaggcgtgagccacctcgcctggccagggaaacagcttttcagcctgcaagtagtgcagtcggga

SEQ ID NO: 24070 - DNA, 201 bp, Homo sapiens
ctttttgagatgaagtcttgcactgtctcccaggctggagtgcagtggcacaatcacaatctcagcttactgcaacttccgcctcccgggttcaagcgatyctcctgcctcagcctcctgagtagctgggactacaggtgtgcaccaccacactcagctaatgtttgtatttttagtagagacagggtttcaccatgttgg

SEQ ID NO: 24071 - DNA, 201 bp, Homo sapiens
cgggaaacaggcaggaggtgactcaactctgagtggatgtgtgggccaccacaggtgctggaggacagtgtgctgccaccctgtgggcctccacattaccrgggaacacttgttaaaaggtaggtggggccgggtgcggtggctcacgcctgtaatcccagcactttgggaggccaaggcgggccgaggtaaggagattga

SEQ ID NO: 24072 - DNA, 201 bp, Homo sapiens
agtcccagctactcggagaggctgaggcaggagaatggcgtgaacccgggaggtggagcttgcagtgagccgagatagtgccactgcactccagcctgggygacagagcgagactccatctcaaaaaaaaaaaaaaaaaattaaatttcttattttttgaaacaggatctctgttgcccacgttggagtgcagtggcgtga

SEQ ID NO: 24073 - DNA, 201 bp, Homo sapiens
ggagtttgaggccagcacaaggatgcaggacaccagcgtctccttcgggtaccagctggacctgcccaaggccaacctcctcttcaaaggtaaaggtctckgttcccctacgcgggaaacaggcaggaggtgactcaactctgagtggatgtgtgggccaccacaggtgctggaggacagtgtgctgccaccctgtgggcc

SEQ ID NO: 24074 - DNA, 201 bp, Homo sapiens
cccagccctccaaagcattgggattactggcatgagccattgcatctggctttttttttttttttgagatggggtctcaccatgttgcccgggctggcttygaatgcctaggctcaagcaatcctcccttctcagcctcccaaatagctgggattacaggcacgtgccaccacgccaggcttgttttctttccctgtccct

SEQ ID NO: 24075 - DNA, 201 bp, Homo sapiens
caaggtcacaactaaatccagaacctcatctcaggcacactggtcgtagtcccaatgtccagtcttaagtcttcttggatatctgtggctcacagattttrggtgtttgagcctcctgctgagcactgctggggccacagcggtgaccagccctgtcttcacgggactcagtgagaggaacagattcatccgcagagtggg

SEQ ID NO: 24076 - DNA, 201 bp, Homo sapiens
tttcctgtccccaactcacctggtgacatcaccccatcttctcatacactacagttgaaccacatgagccttttttgttggtttgtttttgtttttgagayggagtcttgctctgttgcccaggctggagtgctgtggtgcaatctcggctcactgcaacctctgcctccctggttcaagcgattctcctgcctcaggctc

SEQ ID NO: 24077 - DNA, 201 bp, Homo sapiens
tcttcgcacctgctttgctctgtgctgtctcagcttctctgtgtgccctcagtctcgtggcccccaacctcccttcccttctccacgtgtcttcctctccrgggctgcaccctaggagattgctcgatcgtggtggatttctcaactgtgaatcttcagtccctcttcccccttcatttctgtctctgcagatgtgttgtt

SEQ ID NO: 24078 - DNA, 201 bp, Homo sapiens
catggcagaaaacccaggagacagggaagctggaggtgcagcaggtgcagagaggcctcctaggtgaggctgatctgtaggggccccatgaggaagaaacmtttcctgtccccaactcacctggtgacatcaccccatcttctcatacactacagttgaaccacatgagccttttttgttggtttgtttttgtttttgaga

SEQ ID NO: 24079 - DNA, 201 bp, Homo sapiens
ggccatccaggtgagtggggcacggaggctgctgctcccctcggccaccgtgagcagggagccgccctcacaccccctcctctccacagacccagcagtcraagtttgtgaactggcaggtggacggggagtatcggggctctgacttcacagcagccgtcaccctggggaacccagacgtcctcgtgggttcaggtaaga

SEQ ID NO: 24080 - DNA, 201 bp, Homo sapiens
aaggggctaccccggctgggggacaggagcaagaagattccaggcagggagaagcaggaacaggggtgagggaagggaagggccatggcagaaaacccagsagacagggaagctggaggtgcagcaggtgcagagaggcctcctaggtgaggctgatctgtaggggccccatgaggaagaaacatttcctgtccccaactc

SEQ ID NO: 24081 - DNA, 201 bp, Homo sapiens
gcagactccaaagggggtaccactgggagggagtggacggggagaggaggttggattctggatgttgtttgaaggcagagctgccaggatttgttgagacyggatggaggcgatgactctgtagtttttggctggaactggaaggatggagtttcggattgccagctttgtgtctttgtgcagccatccactgtgtcgtgg

SEQ ID NO: 24082 - DNA, 201 bp, Homo sapiens
caatcggggagtccaactaccacttcggggtcacatatgtggggacaaagcagctgagtcccacagaggtgagcttcctttttcatccattcattgtatcyttctaataacaaatttgtagccaaatgtcaagctaagacggcctcatcaggaaaaggtcacagctaccgagagcctggagatggggattgcatctctccg

SEQ ID NO: 24083 - DNA, 201 bp, Homo sapiens
agagctgggctccctgatacttgaaaagactcggagatatagtgccagactgactactcagtttggggacctagaatccagaggtactgtctccccatagsagctaggctggagtgaaggaacaggtctgtgggcctaccggcagcacctcctttctctgagtctcttagtcaggccgtgcctcccagtcttcatcccctg

SEQ ID NO: 24084 - DNA, 201 bp, Homo sapiens
ccagagatcgtccccgccgtccccctccctgcatctgcacactcggcccaattactcctccctcaagagctgggctccctgatacttgaaaagactcggaratatagtgccagactgactactcagtttggggacctagaatccagaggtactgtctccccatagcagctaggctggagtgaaggaacaggtctgtgggcc

SEQ ID NO: 24085 - DNA, 201 bp, Homo sapiens
aaagtgaatccatctccatcctgaggcttgaaaaggcagcccaaaggtggcagttctcttgttcagcaagcactccctacggtggagggacacaggaacgyagacttggacctcagtgcagcaagtcccagccacagctgagcactcgattcctcacaaccccaagaggcagttaggttcacagagagatgatgccagcgt

SEQ ID NO: 24086 - DNA, 201 bp, Homo sapiens
gccttgcctggccctgggtggagagctggtctaccaccggcggcctggagaggagggcactgtcatgtctctagctgggaaatacacatgtgagcctggcrcctgggtccgagggtggaggggctgggcccctggactcctcctgggtctgagggaggacgggctagggccctggacactcaggtctgagggaggaggcct

SEQ ID NO: 24087 - DNA, 201 bp, Homo sapiens
gttggagtggagtgtgacagcgtttctcttctccagagctgtttcccattcagatggagggtgtcaagctcacagtcaacaaagggttgagtaaccatttycaggtgagccttcctggtgtccttacccaccagagatcgtccccgccgtccccctccctgcatctgcacactcggcccaattactcctccctcaagagct

SEQ ID NO: 24088 - DNA, 201 bp, Homo sapiens
tctttacaggtggaatcctttgtgagatgttctgctgtgggtctctggagagagctgggggtggtagggaaggaagagatgagagttggtgtggggttggrgtggagtgtgacagcgtttctcttctccagagctgtttcccattcagatggagggtgtcaagctcacagtcaacaaagggttgagtaaccattttcaggt

SEQ ID NO: 24089 - DNA, 201 bp, Homo sapiens
ctgcaatctttttaaaggaaccagattctgaaatttgccaagaggcagggtcccatagtttctcatcataggtaactttctgttggaactcctcttctgcwctcctactcttcttcctgccctgagttgtagtaatcctagtgctggctccaatagaaactcatcaatttataaagcagagtctagtttagattcatatgt

SEQ ID NO: 24090 - DNA, 201 bp, Homo sapiens; identical to SEQ ID NO: 12569

SEQ ID NO: 24091 - DNA, 201 bp, Homo sapiens; identical to SEQ ID NO: 12570

SEQ ID NO: 24092 - DNA, 201 bp, Homo sapiens; identical to SEQ ID NO: 13311

SEQ ID NO: 24093 - DNA, 201 bp, Homo sapiens; identical to SEQ ID NO: 12979

SEQ ID NO: 24094 - DNA, 201 bp, Homo sapiens; identical to SEQ ID NO: 12980

SEQ ID NO: 24095 - DNA, 201 bp, Homo sapiens
tccatctctgactataaggccaccctgaggtgctgggccctgggcttctaccctgtggagatcacactgacctggcagcaggatggagaggaccagactcrggacatggagcttgtagagaccaggcctgcaggggatggaaacttccagaagtgggcagctgtggtggtgccttctggagaggaacagagatacatgtgc

SEQ ID NO: 24096 - DNA, 201 bp, Homo sapiens
ccagaagtgggcagctgtggtggtgccttctggagaggaacagagatacatgtgccatgtgcagcatgaggggttgcccaagcccctcaccctgagatggrgttaggcaggagatgagtggagggggggtcatgtctcttagggaaagcaggagcctctctggagaacttcagcagggtcggtgctgggggctgagggtca

SEQ ID NO: 24097 - DNA, 201 bp, Homo sapiens
gaagtgggcagctgtggtggtgccttctggagaggaacagagatacatgtgccatgtgcagcatgaggggttgcccaagcccctcaccctgagatggagtwaggcaggagatgagtggagggggggtcatgtctcttagggaaagcaggagcctctctggagaacttcagcagggtcggtgctgggggctgagggtcaggg

SEQ ID NO: 24098 - DNA, 201 bp, Homo sapiens
tgggcagctgtggtggtgccttctggagaggaacagagatacatgtgccatgtgcagcatgaggggttgcccaagcccctcaccctgagatggagttaggyaggagatgagtggagggggggtcatgtctcttagggaaagcaggagcctctctggagaacttcagcagggtcggtgctgggggctgagggtcagggacgc

SEQ ID NO: 24099 - DNA, 201 bp, Homo sapiens
ggcagctgtggtggtgccttctggagaggaacagagatacatgtgccatgtgcagcatgaggggttgcccaagcccctcaccctgagatggagttaggcargagatgagtggagggggggtcatgtctcttagggaaagcaggagcctctctggagaacttcagcagggtcggtgctgggggctgagggtcagggacgctc

SEQ ID NO: 24100 - DNA, 201 bp, Homo sapiens; identical to SEQ ID NO: 12686

SEQ ID NO: 24101 - DNA, 201 bp, Homo sapiens
gaacttcagcagggtcggtgctgggggctgagggtcagggacgctcaccttccccttttttcccagagcagtcttctcagcccaccatccccatcgtgggyatcgttgctggcctggttctccttggagctgtagtcactggagctgtggtttctgctgtgatgtgcaggaagaagaactcaggtaaggaatggatgagga

SEQ ID NO: 24102 - DNA, 201 bp, Homo sapiens; identical to SEQ ID NO: 12688

SEQ ID NO: 24103 - DNA, 201 bp, Homo sapiens
tgtggtggtgccttctggagaggaacagagatacatgtgccatgtgcagcatgaggggttgcccaagcccctcaccctgagatggagttaggcaggagatkagtggagggggggtcatgtctcttagggaaagcaggagcctctctggagaacttcagcagggtcggtgctgggggctgagggtcagggacgctcaccttc

SEQ ID NO: 24104 - DNA, 201 bp, Homo sapiens
agcagggtcggtgctgggggctgagggtcagggacgctcaccttccccttttttcccagagcagtcttctcagcccaccatccccatcgtgggtatcgttrctggcctggttctccttggagctgtagtcactggagctgtggtttctgctgtgatgtgcaggaagaagaactcaggtaaggaatggatgaggagtggggt

SEQ ID NO: 24105 - DNA, 201 bp, Homo sapiens
gagatttcttgtcccactgagggtttcaagccccagttagaagtgtgtcctgcctggttactgggaagcaccatccacactcatgggcctacccagcctgsgccctgtgtgccagcacttactcttttgtaaagcacctgtgacaatgaaggacagatttatcaccttgatgattatgatgatggggacctgatcccagca

SEQ ID NO: 24106 - DNA, 201 bp, Homo sapiens; identical to SEQ ID NO: 12689

SEQ ID NO: 24107 - DNA, 201 bp, Homo sapiens
tcttgtcccactgagggtttcaagccccagttagaagtgtgtcctgcctggttactgggaagcaccatccacactcatgggcctacccagcctgggccctstgtgccagcacttactcttttgtaaagcacctgtgacaatgaaggacagatttatcaccttgatgattatgatgatggggacctgatcccagcagtcaca

SEQ ID NO: 24108 - DNA, 201 bp, Homo sapiens
ccctccactattgtcccatgaccctgccaaatccccctctgtgagaaacacccaagaatgatcaataaaaaaaaaaaaaagaattgaggagcaagcttcayattcagaatccagtggctgaggaagtatccatatccctaagagaaagaaccttgggacaccatgactgttacatgctgggacaattccatcagcccttct

SEQ ID NO: 24109 - DNA, 201 bp, Homo sapiens; identical to SEQ ID NO: 12690

SEQ ID NO: 24110 - DNA, 201 bp, Homo sapiens
tccagatcctgtacaagagagtgactctgagggtctgccctgctctctgatacaattaagggatgaaatctctgaggaaatgaagggaagacaatccctgraatactgatgaggggttccctttgacactggcagcagccttgggccccgttacttttcctctcaggccttgctctctgctttacactcaatgtgtgtggg

SEQ ID NO: 24111 - DNA, 201 bp, Homo sapiens
gggataagtgttaacattgggtgtgagctaacattgctgcccagattcccacagcaccattatgtccctatcacagtggggcttacagaggccagggaatwaacctggacaaattatgccccacggtggaatcactgggtccataaatcctgtcctggttatctccccattctctgtaaaaaggattctctgtaaaaagat

SEQ ID NO: 24112 - DNA, 201 bp, Homo sapiens
tgagctaacattgctgcccagattcccacagcaccattatgtccctatcacagtggggcttacagaggccagggaataaacctggacaaattatgccccayggtggaatcactgggtccataaatcctgtcctggttatctccccattctctgtaaaaaggattctctgtaaaaagattacatcgccctaaaccaggacct

SEQ ID NO: 24113 - DNA, 201 bp, Homo sapiens; identical to SEQ ID NO: 12691

SEQ ID NO: 24114 - DNA, 201 bp, Homo sapiens
atgccccacggtggaatcactgggtccataaatcctgtcctggttatctccccattctctgtaaaaaggattctctgtaaaaagattacatcgccctaaascaggacctgagctcttggactgcggcggccatggcggctcagattacccagcgcaagtgggaggcggcccatgaggcggagcagcagacagcctacctgg

SEQ ID NO: 24115 - DNA, 201 bp, Homo sapiens
atgaatattttattttatagtgtgagacagctgccttgtgtgggactgagaggcaagatttgttcacgccttccctttgtgacttcaaaaaccctgactcwctttctgcaaaggcacctgaatgtgcctgtgttcctgtaggcataatatgaggaggtggggagaccaacccacccccatgtccaccatgaccctcttccc

SEQ ID NO: 24116 - DNA, 201 bp, Homo sapiens
ctgaccgagacctgggcgggtgagtgcgggatccggagggaaatggcctctgcggggaggagctaggggcccgcgcactggggcgcaggacccggggagcmgcgcaaggaggagggtcggacgggtctcagcccctcctcgcccccaggtacccactccataaggtatttcagcaccgccgtgtcccggccgggtcgcggg

SEQ ID NO: 24117 - DNA, 201 bp, Homo sapiens; identical to SEQ ID NO: 13055

SEQ ID NO: 24118 - DNA, 201 bp, Homo sapiens; identical to SEQ ID NO: 13056

SEQ ID NO: 24119 - DNA, 201 bp, Homo sapiens
tgtcctgcctggttactgggaagcaccatccacactcatgggcctacccagcctgggccctgtgtgccagcacttactcttttgtaaagcacctgtgacamtgaaggacagatttatcaccttgatgattatgatgatggggacctgatcccagcagtcacaagtcacaggggaaggtccctgctgaggacagacctcagg

SEQ ID NO: 24120 - DNA, 201 bp, Homo sapiens
ttatcaccttgatgattatgatgatggggacctgatcccagcagtcacaagtcacaggggaaggtccctgctgaggacagacctcaggagggcagttggtycaggacccacacctgctttcctcatgtttcctgatcctgtcctagatcagcagttacactttcaggaaacttctctgggatcaaaggctagggggtttgt

SEQ ID NO: 24121 - DNA, 201 bp, Homo sapiens
atggggacctgatcccagcagtcacaagtcacaggggaaggtccctgctgaggacagacctcaggagggcagttggtccaggacccacacctgctttcctyatgtttcctgatcctgtcctagatcagcagttacactttcaggaaacttctctgggatcaaaggctagggggtttgtttagggccgtatggccctgactc

SEQ ID NO: 24122 - DNA, 201 bp, Homo sapiens
tcacaagtcacaggggaaggtccctgctgaggacagacctcaggagggcagttggtccaggacccacacctgctttcctcatgtttcctgatcctgtcctrgatcagcagttacactttcaggaaacttctctgggatcaaaggctagggggtttgtttagggccgtatggccctgactcctttctggcctctcataggac

SEQ ID NO: 24123 - DNA, 201 bp, Homo sapiens
tgccccacggtggaatcactgggtccataaatcctgtcctggttatctccccattctctgtaaaaaggattctctgtaaaaagattacatcgccctaaacsaggacctgagctcttggactgcggcggccatggcggctcagattacccagcgcaagtgggaggcggcccatgaggcggagcagcagacagcctacctgga

SEQ ID NO: 24124 - DNA, 201 bp, Homo sapiens
cagacctcaggagggcagttggtccaggacccacacctgctttcctcatgtttcctgatcctgtcctagatcagcagttacactttcaggaaacttctctrggatcaaaggctagggggtttgtttagggccgtatggccctgactcctttctggcctctcataggacattttcttcccacagatagagtgagctactctg

SEQ ID NO: 24125 - DNA, 201 bp, Homo sapiens
gggtccataaatcctgtcctggttatctccccattctctgtaaaaaggattctctgtaaaaagattacatcgccctaaaccaggacctgagctcttggacygcggcggccatggcggctcagattacccagcgcaagtgggaggcggcccatgaggcggagcagcagacagcctacctggagggcaggtgcgtggagtggc

SEQ ID NO: 24126 - DNA, 201 bp, Homo sapiens
atcgccctaaaccaggacctgagctcttggactgcggcggccatggcggctcagattacccagcgcaagtgggaggcggcccatgaggcggagcagcagasagcctacctggagggcaggtgcgtggagtggctccgcagatacctggagaacaggaaggagacactgcagcacacctgtaccagggaccacgggcgcctc

SEQ ID NO: 24127 - DNA, 201 bp, Homo sapiens
taagtatgaagtgggctgatccctgagatccttgggatattgtggtcgggagcccatgggggagctcacccaaccccagattcctcctctagccgcatctyctctgggctctgaccaagtcctgtttttgttctaccccaggcagcgaccatgcgcagggttctgatgtgtctctcacggcttgtaaaggtgagacgctgg

SEQ ID NO: 24128 - DNA, 201 bp, Homo sapiens
ctgagctcttggactgcggcggccatggcggctcagattacccagcgcaagtgggaggcggcccatgaggcggagcagcagacagcctacctggagggcasgtgcgtggagtggctccgcagatacctggagaacaggaaggagacactgcagcacacctgtaccagggaccacgggcgcctccctgatcgcctgtaatct

SEQ ID NO: 24129 - DNA, 201 bp, Homo sapiens
gtatgaagtgggctgatccctgagatccttgggatattgtggtcgggagcccatgggggagctcacccaaccccagattcctcctctagccgcatctcctstgggctctgaccaagtcctgtttttgttctaccccaggcagcgaccatgcgcagggttctgatgtgtctctcacggcttgtaaaggtgagacgctggggg

SEQ ID NO: 24130 - DNA, 201 bp, Homo sapiens
ggggctgtgcccagtgggtgctcaggccaccgtgcgctttatgtggtcactgctcagctgggtcatctttgctgctccgttgtccttggctgtatgatccrgccctacggggcttagcgggttttctccccgtgtgcggagatgagagattgtaataaataaaagcacaagacaaagagataaagagaaaacagctgggcc

SEQ ID NO: 24131 - DNA, 201 bp, Homo sapiens
cgggagcccatgggggagctcacccaaccccagattcctcctctagccgcatctcctctgggctctgaccaagtcctgtttttgttctaccccaggcagcraccatgcgcagggttctgatgtgtctctcacggcttgtaaaggtgagacgctgggggacctgatgtgtggggggtgttgggggcaatagtggatgcagct

SEQ ID NO: 24132 - DNA, 201 bp, Homo sapiens
gattacccagcgcaagtgggaggcggcccatgaggcggagcagcagacagcctacctggagggcaggtgcgtggagtggctccgcagatacctggagaacrggaaggagacactgcagcacacctgtaccagggaccacgggcgcctccctgatcgcctgtaatctcccgggctggcctcccacaaggatgggagacagat

SEQ ID NO: 24133 - DNA, 201 bp, Homo sapiens; identical to SEQ ID NO: 12704

SEQ ID NO: 24134 - DNA, 201 bp, Homo sapiens
cgcaagtgggaggcggcccatgaggcggagcagcagacagcctacctggagggcaggtgcgtggagtggctccgcagatacctggagaacaggaaggagayactgcagcacacctgtaccagggaccacgggcgcctccctgatcgcctgtaatctcccgggctggcctcccacaaggatgggagacagatgggaccaaca

SEQ ID NO: 24135 - DNA, 201 bp, Homo sapiens; identical to SEQ ID NO: 13186

SEQ ID NO: 24136 - DNA, 201 bp, Homo sapiens; identical to SEQ ID NO: 13188

SEQ ID NO: 24137 - DNA, 201 bp, Homo sapiens; identical to SEQ ID NO: 12849

SEQ ID NO: 24138 - DNA, 201 bp, Homo sapiens; identical to SEQ ID NO: 13189

SEQ ID NO: 24139 - DNA, 201 bp, Homo sapiens; identical to SEQ ID NO: 12850

SEQ ID NO: 24140 - DNA, 201 bp, Homo sapiens; identical to SEQ ID NO: 12851

SEQ ID NO: 24141 - DNA, 201 bp, Homo sapiens; identical to SEQ ID NO: 13192

SEQ ID NO: 24142 - DNA, 201 bp, Homo sapiens
aatgtgcctgtgttcctgtaggcataatatgaggaggtggggagaccaacccacccccatgtccaccatgaccctcttccctcatgctgacctgtgttccstctccaataattaatcattcctgctccatagaggtgaggctgagatgtctccatctctgtctcaactttatgtgcactgagctgtaacttcttacttccc

SEQ ID NO: 24143 - DNA, 201 bp, Homo sapiens; identical to SEQ ID NO: 13194

SEQ ID NO: 24144 - DNA, 201 bp, Homo sapiens; identical to SEQ ID NO: 13196

SEQ ID NO: 24145 - DNA, 201 bp, Homo sapiens
gaacctgcccatgccgcgccgctactaccaccagagctaggccggtgaatgaccccggcctggggcgaaggtcacgacccctcctcatcccccacggacgycccgggtcccccccgcgagtctccggctccgagatccaccccgaggctgcgggacccgccagatcctcgacccgggagaggcccaggcgcctttaccagg

SEQ ID NO: 24146 - DNA, 201 bp, Homo sapiens
agattcctcctctagccgcatctcctctgggctctgaccaagtcctgtttttgttctaccccaggcagcgaccatgcgcagggttctgatgtgtctctcayggcttgtaaaggtgagacgctgggggacctgatgtgtggggggtgttgggggcaatagtggatgcagctgtgctatggggtttctttgaattggatgtat

SEQ ID NO: 24147 - DNA, 201 bp, Homo sapiens
catctcctctgggctctgaccaagtcctgtttttgttctaccccaggcagcgaccatgcgcagggttctgatgtgtctctcacggcttgtaaaggtgagamgctgggggacctgatgtgtggggggtgttgggggcaatagtggatgcagctgtgctatggggtttctttgaattggatgtattgaacatgtgatgggctg

SEQ ID NO: 24148 - DNA, 201 bp, Homo sapiens
tttcagatctttcaagctcttgccctcttcccagggctctttcctcattgtattttccatcttttctgcaatctttttaaaggaaccagattctgaaattygccaagaggcagggtcccatagtttctcatcataggtaactttctgttggaactcctcttctgcactcctactcttcttcctgccctgagttgtagtaat

SEQ ID NO: 24149 - DNA, 201 bp, Homo sapiens
gccctacggggcttagcgggttttctccccgtgtgcggagatgagagattgtaataaataaaagcacaagacaaagagataaagagaaaacagctgggccsgggggaccactaccatcaagatgcggagaccggtagtggccccgaacagctgggctcgctgatatttattgcatacaagacaaggggcagggtaaggaag

SEQ ID NO: 24150 - DNA, 201 bp, Homo sapiens
atctcctctgggctctgaccaagtcctgtttttgttctaccccaggcagcgaccatgcgcagggttctgatgtgtctctcacggcttgtaaaggtgagacrctgggggacctgatgtgtggggggtgttgggggcaatagtggatgcagctgtgctatggggtttctttgaattggatgtattgaacatgtgatgggctgt

SEQ ID NO: 24151 - DNA, 201 bp, Homo sapiens
ggcagcgaccatgcgcagggttctgatgtgtctctcacggcttgtaaaggtgagacgctgggggacctgatgtgtggggggtgttgggggcaatagtggaygcagctgtgctatggggtttctttgaattggatgtattgaacatgtgatgggctgtttaaagtgtcatccctcactgtgacggatatgaatttgttcatg

SEQ ID NO: 24152 - DNA, 201 bp, Homo sapiens
ttgtaaaggtgagacgctgggggacctgatgtgtggggggtgttgggggcaatagtggatgcagctgtgctatggggtttctttgaattggatgtattgarcatgtgatgggctgtttaaagtgtcatccctcactgtgacggatatgaatttgttcatgaatattttattttatagtgtgagacagctgccttgtgtggg

SEQ ID NO: 24153 - DNA, 201 bp, Homo sapiens
gatgtgtggggggtgttgggggcaatagtggatgcagctgtgctatggggtttctttgaattggatgtattgaacatgtgatgggctgtttaaagtgtcayccctcactgtgacggatatgaatttgttcatgaatattttattttatagtgtgagacagctgccttgtgtgggactgagaggcaagatttgttcacgcct

SEQ ID NO: 24154 - DNA, 201 bp, Homo sapiens
tattgaacatgtgatgggctgtttaaagtgtcatccctcactgtgacggatatgaatttgttcatgaatattttattttatagtgtgagacagctgccttstgtgggactgagaggcaagatttgttcacgccttccctttgtgacttcaaaaaccctgactctctttctgcaaaggcacctgaatgtgcctgtgttcctg

SEQ ID NO: 24155 - DNA, 201 bp, Homo sapiens
ccctgactctctttctgcaaaggcacctgaatgtgcctgtgttcctgtaggcataatatgaggaggtggggagaccaacccacccccatgtccaccatgaycctcttccctcatgctgacctgtgttccgtctccaataattaatcattcctgctccatagaggtgaggctgagatgtctccatctctgtctcaactttat

SEQ ID NO: 24156 - DNA, 201 bp, Homo sapiens
agcgaagccaatcggcgtcgctggggtccctgttccagaagtccccgcgaacccattgggactcagattctccccagacgccgaggatggggtcatggcgwcccgaaccctcctcctgctgctcttgggggccctggccctgaccgagacctgggcgggtgagtgcgggatccggagggaaatggcctctgcggggaggag

SEQ ID NO: 24157 - DNA, 201 bp, Homo sapiens
gaggtggggagaccaacccacccccatgtccaccatgaccctcttccctcatgctgacctgtgttccgtctccaataattaatcattcctgctccatagasgtgaggctgagatgtctccatctctgtctcaactttatgtgcactgagctgtaacttcttacttccctattaaaattagaatctgagtataaatttactt

SEQ ID NO: 24158 - DNA, 201 bp, Homo sapiens
aagccaatcggcgtcgctggggtccctgttccagaagtccccgcgaacccattgggactcagattctccccagacgccgaggatggggtcatggcgtcccraaccctcctcctgctgctcttgggggccctggccctgaccgagacctgggcgggtgagtgcgggatccggagggaaatggcctctgcggggaggagctag

SEQ ID NO: 24159 - DNA, 201 bp, Homo sapiens; identical to SEQ ID NO: 13210

SEQ ID NO: 24160 - DNA, 201 bp, Homo sapiens
gctggggtccctgttccagaagtccccgcgaacccattgggactcagattctccccagacgccgaggatggggtcatggcgtcccgaaccctcctcctgcygctcttgggggccctggccctgaccgagacctgggcgggtgagtgcgggatccggagggaaatggcctctgcggggaggagctaggggcccgcgcactgg

SEQ ID NO: 24161 - DNA, 201 bp, Homo sapiens; identical to SEQ ID NO: 13212

SEQ ID NO: 24162 - DNA, 201 bp, Homo sapiens
ggatggggtcatggcgtcccgaaccctcctcctgctgctcttgggggccctggccctgaccgagacctgggcgggtgagtgcgggatccggagggaaatgrcctctgcggggaggagctaggggcccgcgcactggggcgcaggacccggggagcagcgcaaggaggagggtcggacgggtctcagcccctcctcgccccc

SEQ ID NO: 24163 - DNA, 201 bp, Homo sapiens; identical to SEQ ID NO: 13216

SEQ ID NO: 24164 - DNA, 201 bp, Homo sapiens; identical to SEQ ID NO: 13001

SEQ ID NO: 24165 - DNA, 201 bp, Homo sapiens; identical to SEQ ID NO: 13002

SEQ ID NO: 24166 - DNA, 201 bp, Homo sapiens; identical to SEQ ID NO: 12498

SEQ ID NO: 24167 - DNA, 201 bp, Homo sapiens; identical to SEQ ID NO: 12876

SEQ ID NO: 24168 - DNA, 201 bp, Homo sapiens; identical to SEQ ID NO: 13221

SEQ ID NO: 24169 - DNA, 201 bp, Homo sapiens; identical to SEQ ID NO: 13222

SEQ ID NO: 24170 - DNA, 201 bp, Homo sapiens
tgtccaccatgaccctcttccctcatgctgacctgtgttccgtctccaataattaatcattcctgctccatagaggtgaggctgagatgtctccatctctrtctcaactttatgtgcactgagctgtaacttcttacttccctattaaaattagaatctgagtataaatttactttttcaaattcttgccatgagaggttg

SEQ ID NO: 24171 - DNA, 201 bp, Homo sapiens
gtctccaataattaatcattcctgctccatagaggtgaggctgagatgtctccatctctgtctcaactttatgtgcactgagctgtaacttcttacttccytattaaaattagaatctgagtataaatttactttttcaaattcttgccatgagaggttgatgggttaattaaaggagaagattcctaaaatttgagagac

SEQ ID NO: 24172 - DNA, 201 bp, Homo sapiens
actttatgtgcactgagctgtaacttcttacttccctattaaaattagaatctgagtataaatttactttttcaaattcttgccatgagaggttgatgggytaattaaaggagaagattcctaaaatttgagagacaaaataaatggaagacatgagaaccttccagagtccacatgtttcttatgctgatttgttgcatg

SEQ ID NO: 24173 - DNA, 201 bp, Homo sapiens
cccgaaccctcctcctgctgctcttgggggccctggccctgaccgagacctgggcgggtgagtgcgggatccggagggaaatggcctctgcggggaggagstaggggcccgcgcactggggcgcaggacccggggagcagcgcaaggaggagggtcggacgggtctcagcccctcctcgcccccaggtacccactccataa

SEQ ID NO: 24174 - DNA, 201 bp, Homo sapiens
attcttgccatgagaggttgatgggttaattaaaggagaagattcctaaaatttgagagacaaaataaatggaagacatgagaaccttccagagtccacawgtttcttatgctgatttgttgcatgagaggagagtagatggggctgtgcccagtgggtgctcaggccaccgtgcgctttatgtggtcactgctcagctgg

SEQ ID NO: 24175 - DNA, 201 bp, Homo sapiens
accgagacctgggcgggtgagtgcgggatccggagggaaatggcctctgcggggaggagctaggggcccgcgcactggggcgcaggacccggggagcagckcaaggaggagggtcggacgggtctcagcccctcctcgcccccaggtacccactccataaggtatttcagcaccgccgtgtcccggccgggtcgcggggag

SEQ ID NO: 24176 - DNA, 201 bp, Homo sapiens
gagtgcgggatccggagggaaatggcctctgcggggaggagctaggggcccgcgcactggggcgcaggacccggggagcagcgcaaggaggagggtcggaygggtctcagcccctcctcgcccccaggtacccactccataaggtatttcagcaccgccgtgtcccggccgggtcgcggggagccccggtacatcgcagtg

SEQ ID NO: 24177 - DNA, 201 bp, Homo sapiens
acatgagaaccttccagagtccacatgtttcttatgctgatttgttgcatgagaggagagtagatggggctgtgcccagtgggtgctcaggccaccgtgcrctttatgtggtcactgctcagctgggtcatctttgctgctccgttgtccttggctgtatgatccagccctacggggcttagcgggttttctccccgtgtg

SEQ ID NO: 24178 - DNA, 201 bp, Homo sapiens
tgcggggaggagctaggggcccgcgcactggggcgcaggacccggggagcagcgcaaggaggagggtcggacgggtctcagcccctcctcgcccccaggtwcccactccataaggtatttcagcaccgccgtgtcccggccgggtcgcggggagccccggtacatcgcagtgggctacgtggacgacacgcagttcgtgcg

SEQ ID NO: 24179 - DNA, 201 bp, Homo sapiens
tgttgcatgagaggagagtagatggggctgtgcccagtgggtgctcaggccaccgtgcgctttatgtggtcactgctcagctgggtcatctttgctgctcygttgtccttggctgtatgatccagccctacggggcttagcgggttttctccccgtgtgcggagatgagagattgtaataaataaaagcacaagacaaaga

SEQ ID NO: 24180 - DNA, 201 bp, Homo sapiens
ggcccgcgcactggggcgcaggacccggggagcagcgcaaggaggagggtcggacgggtctcagcccctcctcgcccccaggtacccactccataaggtakttcagcaccgccgtgtcccggccgggtcgcggggagccccggtacatcgcagtgggctacgtggacgacacgcagttcgtgcggttcgacagcgacgcgg

SEQ ID NO: 24181 - DNA, 201 bp, Homo sapiens
gggtcgcggggagccccggtacatcgcagtgggctacgtggacgacacgcagttcgtgcggttcgacagcgacgcggcgactccgaggatgtagccgcagkcgccgtggttggagcaggagggaccggagtattgggaccggagcacacggaacatcaggcccgcgcacagactgacaagagtgaacctgcccatgccgcg

SEQ ID NO: 24182 - DNA, 201 bp, Homo sapiens
gggctgtgcccagtgggtgctcaggccaccgtgcgctttatgtggtcactgctcagctgggtcatctttgctgctccgttgtccttggctgtatgatccakccctacggggcttagcgggttttctccccgtgtgcggagatgagagattgtaataaataaaagcacaagacaaagagataaagagaaaacagctgggccc

SEQ ID NO: 24183 - DNA, 201 bp, Homo sapiens
cgcggggagccccggtacatcgcagtgggctacgtggacgacacgcagttcgtgcggttcgacagcgacgcggcgactccgaggatgtagccgcaggcgcmgtggttggagcaggagggaccggagtattgggaccggagcacacggaacatcaggcccgcgcacagactgacaagagtgaacctgcccatgccgcgccgc

SEQ ID NO: 24184 - DNA, 201 bp, Homo sapiens
cagtgggtgctcaggccaccgtgcgctttatgtggtcactgctcagctgggtcatctttgctgctccgttgtccttggctgtatgatccagccctacgggrcttagcgggttttctccccgtgtgcggagatgagagattgtaataaataaaagcacaagacaaagagataaagagaaaacagctgggcccgggggaccac

SEQ ID NO: 24185 - DNA, 201 bp, Homo sapiens
acatcgcagtgggctacgtggacgacacgcagttcgtgcggttcgacagcgacgcggcgactccgaggatgtagccgcaggcgccgtggttggagcaggakggaccggagtattgggaccggagcacacggaacatcaggcccgcgcacagactgacaagagtgaacctgcccatgccgcgccgctactaccaccagagct

SEQ ID NO: 24186 - DNA, 201 bp, Homo sapiens
cagttcgtgcggttcgacagcgacgcggcgactccgaggatgtagccgcaggcgccgtggttggagcaggagggaccggagtattgggaccggagcacacsgaacatcaggcccgcgcacagactgacaagagtgaacctgcccatgccgcgccgctactaccaccagagctaggccggtgaatgaccccggcctggggcg

SEQ ID NO: 24187 - DNA, 201 bp, Homo sapiens; identical to SEQ ID NO: 13236

SEQ ID NO: 24188 - DNA, 201 bp, Homo sapiens
cagagctaggccggtgaatgaccccggcctggggcgaaggtcacgacccctcctcatcccccacggacgtcccgggtcccccccgcgagtctccggctccragatccaccccgaggctgcgggacccgccagatcctcgacccgggagaggcccaggcgcctttaccaggtttcattttccgtttaggccaaaatccccgc

SEQ ID NO: 24189 - DNA, 201 bp, Homo sapiens; identical to SEQ ID NO: 13238

SEQ ID NO: 24190 - DNA, 201 bp, Homo sapiens; identical to SEQ ID NO: 13240

SEQ ID NO: 24191 - DNA, 201 bp, Homo sapiens; identical to SEQ ID NO: 13241

SEQ ID NO: 24192 - DNA, 201 bp, Homo sapiens; identical to SEQ ID NO: 13242

SEQ ID NO: 24193 - DNA, 201 bp, Homo sapiens; identical to SEQ ID NO: 13244

SEQ ID NO: 24194 - DNA, 201 bp, Homo sapiens; identical to SEQ ID NO: 13246

SEQ ID NO: 24195 - DNA, 201 bp, Homo sapiens; identical to SEQ ID NO: 12901

SEQ ID NO: 24196 - DNA, 201 bp, Homo sapiens
ttacagaggccagggaataaacctggacaaattatgccccacggtggaatcactgggtccataaatcctgtcctggttatctccccattctctgtaaaaasgattctctgtaaaaagattacatcgccctaaaccaggacctgagctcttggactgcggcggccatggcggctcagattacccagcgcaagtgggaggcgg

SEQ ID NO: 24197 - DNA, 201 bp, Homo sapiens
ctgtcctagatcagcagttacactttcaggaaacttctctgggatcaaaggctagggggtttgtttagggccgtatggccctgactcctttctggcctctyataggacattttcttcccacagatagagtgagctactctgaagctgcaagtaagtatgaagtgggctgatccctgagatccttgggatattgtggtcggg

SEQ ID NO: 24198 - DNA, 201 bp, Homo sapiens
aggatagggggcccttcccttttaggtagcatatgtcaccattttcttttctgcacttaagatcaaagactttaagactttcactatttcttctaccattwtctactacgaaattcaaagaggaaccaggagtacaggaggagcatgaaagtggacaaggagcatgaccactgaagcacagcaccacagggaggggtttag

SEQ ID NO: 24199 - DNA, 201 bp, Homo sapiens; identical to SEQ ID NO: 12911

SEQ ID NO: 24200 - DNA, 201 bp, Homo sapiens
gggcccttcccttttaggtagcatatgtcaccattttcttttctgcacttaagatcaaagactttaagactttcactatttcttctaccattatctactaygaaattcaaagaggaaccaggagtacaggaggagcatgaaagtggacaaggagcatgaccactgaagcacagcaccacagggaggggtttaggcctctgg

SEQ ID NO: 24201 - DNA, 201 bp, Homo sapiens
acttaagatcaaagactttaagactttcactatttcttctaccattatctactacgaaattcaaagaggaaccaggagtacaggaggagcatgaaagtggrcaaggagcatgaccactgaagcacagcaccacagggaggggtttaggcctctggatgactgcgggtagctctggataatatccagccttctacaagaagc

SEQ ID NO: 24202 - DNA, 201 bp, Homo sapiens; identical to SEQ ID NO: 12912

SEQ ID NO: 24203 - DNA, 201 bp, Homo sapiens
agaggaaccaggagtacaggaggagcatgaaagtggacaaggagcatgaccactgaagcacagcaccacagggaggggtttaggcctctggatgactgcgrgtagctctggataatatccagccttctacaagaagctggtggagcagagtgttccccgactcctccaagaaagggagactccctttcatggtctgctaag

SEQ ID NO: 24204 - DNA, 201 bp, Homo sapiens
gcacagcaccacagggaggggtttaggcctctggatgactgcgggtagctctggataatatccagccttctacaagaagctggtggagcagagtgttcccygactcctccaagaaagggagactccctttcatggtctgctaagtaacaggtgccttcccagacattggcattgccacttgaccaaggatccctcaagcgg

SEQ ID NO: 24205 - DNA, 201 bp, Homo sapiens
aggatccctcaagcggcccttatgcgggcgtgacagaaggctcatctcttgccttctaggtcacttctcacaatgtcccttcagcacctgaccctatgccygccagttattcctaggttatcttagtaatgcaacaaagagtaatattaaaagctaatgattaataatgtttataataatgattgataatttttcatgatc

SEQ ID NO: 24206 - DNA, 201 bp, Homo sapiens; identical to SEQ ID NO: 13259

SEQ ID NO: 24207 - DNA, 201 bp, Homo sapiens; identical to SEQ ID NO: 13261

SEQ ID NO: 24208 - DNA, 201 bp, Homo sapiens; identical to SEQ ID NO: 13262

SEQ ID NO: 24209 - DNA, 201 bp, Homo sapiens
gctaggccggtgaatgaccccggcctggggcgaaggtcacgacccctcctcatcccccacggacgtcccgggtcccccccgcgagtctccggctccgagayccaccccgaggctgcgggacccgccagatcctcgacccgggagaggcccaggcgcctttaccaggtttcattttccgtttaggccaaaatccccgcgggt

SEQ ID NO: 24210 - DNA, 201 bp, Homo sapiens
cccccacggacgtcccgggtcccccccgcgagtctccggctccgagatccaccccgaggctgcgggacccgccagatcctcgacccgggagaggcccaggmgcctttaccaggtttcattttccgtttaggccaaaatccccgcgggttggtcggggcgggggcggggctcggtgggcggggctgacagcgggggcggggc

SEQ ID NO: 24211 - DNA, 201 bp, Homo sapiens
ccccgcgagtctccggctccgagatccaccccgaggctgcgggacccgccagatcctcgacccgggagaggcccaggcgcctttaccaggtttcattttcmgtttaggccaaaatccccgcgggttggtcggggcgggggcggggctcggtgggcggggctgacagcgggggcggggccagggtctaacaccctccagata

SEQ ID NO: 24212 - DNA, 201 bp, Homo sapiens
ggagaggcccaggcgcctttaccaggtttcattttccgtttaggccaaaatccccgcgggttggtcggggcgggggcggggctcggtgggcggggctgacmgcgggggcggggccagggtctaacaccctccagataatgtatggctgcgacttggggctggaagggcgcctcctccgcgggtatgaacagcacgccaacg

SEQ ID NO: 24213 - DNA, 201 bp, Homo sapiens
ccgcgggttggtcggggcgggggcggggctcggtgggcggggctgacagcgggggcggggccagggtctaacaccctccagataatgtatggctgcgactyggggctggaagggcgcctcctccgcgggtatgaacagcacgccaacgatggcaaggattacatagcccggaactaggacctgcgctcctggaccgcggcg

SEQ ID NO: 24214 - DNA, 201 bp, Homo sapiens
tcggggcgggggcggggctcggtgggcggggctgacagcgggggcggggccagggtctaacaccctccagataatgtatggctgcgacttggggctggaasggcgcctcctccgcgggtatgaacagcacgccaacgatggcaaggattacatagcccggaactaggacctgcgctcctggaccgcggcggacatggcggc

SEQ ID NO: 24215 - DNA, 201 bp, Homo sapiens; identical to SEQ ID NO: 12931

SEQ ID NO: 24216 - DNA, 201 bp, Homo sapiens
gctgacagcgggggcggggccagggtctaacaccctccagataatgtatggctgcgacttggggctggaagggcgcctcctccgcgggtatgaacagcacsccaacgatggcaaggattacatagcccggaactaggacctgcgctcctggaccgcggcggacatggcggctcagatcaccaagcgcaagtgggaggcaga

SEQ ID NO: 24217 - DNA, 201 bp, Homo sapiens
gaagggcgcctcctccgcgggtatgaacagcacgccaacgatggcaaggattacatagcccggaactaggacctgcgctcctggaccgcggcggacatggmggctcagatcaccaagcgcaagtgggaggcagaagaatttgcagagcagatcagggcctacctggagggcacgtgcgtggagaggctcgcagacacctgg

SEQ ID NO: 24218 - DNA, 201 bp, Homo sapiens
tcttgcctcggcacctgagtaatcctccacccacacttggcccttcagtagaaccttgtcccaccatgacctgtgatcacagggacttggatgtcacctayggcagtccctgcataccagggtccttgtggtatcaagagacaaattttcagatctttcaagctcttgccctcttcccagggctctttcctcattgtattt

SEQ ID NO: 24219 - DNA, 201 bp, Homo sapiens
ctgagtaatcctccacccacacttggcccttcagtagaaccttgtcccaccatgacctgtgatcacagggacttggatgtcacctatggcagtccctgcayaccagggtccttgtggtatcaagagacaaattttcagatctttcaagctcttgccctcttcccagggctctttcctcattgtattttccatcttttctgc

SEQ ID NO: 24220 - DNA, 201 bp, Homo sapiens
tgagtaatcctccacccacacttggcccttcagtagaaccttgtcccaccatgacctgtgatcacagggacttggatgtcacctatggcagtccctgcatwccagggtccttgtggtatcaagagacaaattttcagatctttcaagctcttgccctcttcccagggctctttcctcattgtattttccatcttttctgca

SEQ ID NO: 24221 - DNA, 201 bp, Homo sapiens
ttgtcccaccatgacctgtgatcacagggacttggatgtcacctatggcagtccctgcataccagggtccttgtggtatcaagagacaaattttcagatckttcaagctcttgccctcttcccagggctctttcctcattgtattttccatcttttctgcaatctttttaaaggaaccagattctgaaatttgccaagagg

SEQ ID NO: 24222 - DNA, 201 bp, Homo sapiens
ctgtgatcacagggacttggatgtcacctatggcagtccctgcataccagggtccttgtggtatcaagagacaaattttcagatctttcaagctcttgccstcttcccagggctctttcctcattgtattttccatcttttctgcaatctttttaaaggaaccagattctgaaatttgccaagaggcagggtcccatagtt

SEQ ID NO: 24223 - DNA, 201 bp, Homo sapiens
ttgccctcttcccagggctctttcctcattgtattttccatcttttctgcaatctttttaaaggaaccagattctgaaatttgccaagaggcagggtcccrtagtttctcatcataggtaactttctgttggaactcctcttctgcactcctactcttcttcctgccctgagttgtagtaatcctagtgctggctccaata

SEQ ID NO: 24224 - DNA, 201 bp, Homo sapiens
tggatgactgcgggtagctctggataatatccagccttctacaagaagctggtggagcagagtgttccccgactcctccaagaaagggagactccctttcrtggtctgctaagtaacaggtgccttcccagacattggcattgccacttgaccaaggatccctcaagcggcccttatgcgggcgtgacagaaggctcatct

SEQ ID NO: 24225 - DNA, 201 bp, Homo sapiens; identical to SEQ ID NO: 13273

SEQ ID NO: 24226 - DNA, 201 bp, Homo sapiens; identical to SEQ ID NO: 13276

SEQ ID NO: 24227 - DNA, 201 bp, Homo sapiens; identical to SEQ ID NO: 13280

SEQ ID NO: 24228 - DNA, 201 bp, Homo sapiens; identical to SEQ ID NO: 13281

SEQ ID NO: 24229 - DNA, 201 bp, Homo sapiens
gcgcaagtgggaggcagaagaatttgcagagcagatcagggcctacctggagggcacgtgcgtggagaggctcgcagacacctggagaacgggaaggagaygctgcagctcacgggtaccagggaacacaagacgtctccctgatcgcctgtagatctcctgggctggcttcccacaaagagagaaggaaaatgggaccaa

SEQ ID NO: 24230 - DNA, 201 bp, Homo sapiens
tcagggcctacctggagggcacgtgcgtggagaggctcgcagacacctggagaacgggaaggagatgctgcagctcacgggtaccagggaacacaagacgyctccctgatcgcctgtagatctcctgggctggcttcccacaaagagagaaggaaaatgggaccaacactagaatgtcgtcctctctctggtcctgaggga

SEQ ID NO: 24231 - DNA, 201 bp, Homo sapiens
agggtctgccctgctctctgatacaattaagggatgaaatctctgaggaaatgaagggaagacaatccctggaatactgatgaggggttccctttgacacyggcagcagccttgggccccgttacttttcctctcaggccttgctctctgctttacactcaatgtgtgtgggggtctgagtccagctcttctgagtccctc

SEQ ID NO: 24232 - DNA, 201 bp, Homo sapiens
gggtctgccctgctctctgatacaattaagggatgaaatctctgaggaaatgaagggaagacaatccctggaatactgatgaggggttccctttgacactrgcagcagccttgggccccgttacttttcctctcaggccttgctctctgctttacactcaatgtgtgtgggggtctgagtccagctcttctgagtccctca

SEQ ID NO: 24233 - DNA, 201 bp, Homo sapiens
ggatgaaatctctgaggaaatgaagggaagacaatccctggaatactgatgaggggttccctttgacactggcagcagccttgggccccgttacttttccyctcaggccttgctctctgctttacactcaatgtgtgtgggggtctgagtccagctcttctgagtccctcagcctccactcaggtcaggaccagaagacac

SEQ ID NO: 24234 - DNA, 201 bp, Homo sapiens
tgaggaaatgaagggaagacaatccctggaatactgatgaggggttccctttgacactggcagcagccttgggccccgttacttttcctctcaggccttgytctctgctttacactcaatgtgtgtgggggtctgagtccagctcttctgagtccctcagcctccactcaggtcaggaccagaagacactgttccctcctc

SEQ ID NO: 24235 - DNA, 201 bp, Homo sapiens; identical to SEQ ID NO: 13284

SEQ ID NO: 24236 - DNA, 201 bp, Homo sapiens; identical to SEQ ID NO: 13285

SEQ ID NO: 24237 - DNA, 201 bp, Homo sapiens
catagtttctcatcataggtaactttctgttggaactcctcttctgcactcctactcttcttcctgccctgagttgtagtaatcctagtgctggctccaakagaaactcatcaatttataaagcagagtctagtttagattcatatgtggttggaaaattggacccataagcctagggttatctttcctgaagagaaaaat

SEQ ID NO: 24238 - DNA, 201 bp, Homo sapiens; identical to SEQ ID NO: 12556

SEQ ID NO: 24239 - DNA, 201 bp, Homo sapiens
gagtctagtttagattcatatgtggttggaaaattggacccataagcctagggttatctttcctgaagagaaaaatatggttgtgtgctgcagtgtgcagkagagttggtgtggggggagggagggagggagggaggacacacaagcagccctggtgagaaaagctccagtggcactgatgtcagtgtgagatgatgttgt

SEQ ID NO: 24240 - DNA, 201 bp, Homo sapiens; identical to SEQ ID NO: 12557

SEQ ID NO: 24241 - DNA, 201 bp, Homo sapiens
gtttagattcatatgtggttggaaaattggacccataagcctagggttatctttcctgaagagaaaaatatggttgtgtgctgcagtgtgcaggagagttrgtgtggggggagggagggagggagggaggacacacaagcagccctggtgagaaaagctccagtggcactgatgtcagtgtgagatgatgttgttctgtag

SEQ ID NO: 24242 - DNA, 201 bp, Homo sapiens
gaagagaaaaatatggttgtgtgctgcagtgtgcaggagagttggtgtggggggagggagggagggagggaggacacacaagcagccctggtgagaaaagmtccagtggcactgatgtcagtgtgagatgatgttgttctgtagctgccacaaaaataaagcatttgtcctgaggctacattaataaagatattgcctcta

SEQ ID NO: 24243 - DNA, 201 bp, Homo sapiens
gagaaaaatatggttgtgtgctgcagtgtgcaggagagttggtgtggggggagggagggagggagggaggacacacaagcagccctggtgagaaaagctcyagtggcactgatgtcagtgtgagatgatgttgttctgtagctgccacaaaaataaagcatttgtcctgaggctacattaataaagatattgcctctagaa

SEQ ID NO: 24244 - DNA, 201 bp, Homo sapiens
agaaaaatatggttgtgtgctgcagtgtgcaggagagttggtgtggggggagggagggagggagggaggacacacaagcagccctggtgagaaaagctccrgtggcactgatgtcagtgtgagatgatgttgttctgtagctgccacaaaaataaagcatttgtcctgaggctacattaataaagatattgcctctagaat

SEQ ID NO: 24245 - DNA, 201 bp, Homo sapiens
gcatttgtcctgaggctacattaataaagatattgcctctagaatagagtggttctctatgatcattccttcaactgacatttgtttctgctaggtatatractgtttttgcatttagaaagcatcattaaagtaaaaacagaaaaatttcgggccttgtggtgcatatgttctagatgcaagcttgtccaacccgcggct

SEQ ID NO: 24246 - DNA, 201 bp, Homo sapiens
atgatcattccttcaactgacatttgtttctgctaggtatataactgtttttgcatttagaaagcatcattaaagtaaaaacagaaaaatttcgggccttrtggtgcatatgttctagatgcaagcttgtccaacccgcggctcgtgggctgcatgtggcccaggacaattttgaatgtgaggacttttttgcttatctgt

SEQ ID NO: 24247 - DNA, 201 bp, Homo sapiens
cagccttgggccccgttacttttcctctcaggccttgctctctgctttacactcaatgtgtgtgggggtctgagtccagctcttctgagtccctcagcctscactcaggtcaggaccagaagacactgttccctcctcagggactagaattttccacggataggagattatcccaggtacctgtgtccaggttggcgtctg

SEQ ID NO: 24248 - DNA, 201 bp, Homo sapiens
tcctctcaggccttgctctctgctttacactcaatgtgtgtgggggtctgagtccagctcttctgagtccctcagcctccactcaggtcaggaccagaagwcactgttccctcctcagggactagaattttccacggataggagattatcccaggtacctgtgtccaggttggcgtctgggttctgtgctcccttccccac

SEQ ID NO: 24249 - DNA, 201 bp, Homo sapiens
tttacactcaatgtgtgtgggggtctgagtccagctcttctgagtccctcagcctccactcaggtcaggaccagaagacactgttccctcctcagggactrgaattttccacggataggagattatcccaggtacctgtgtccaggttggcgtctgggttctgtgctcccttccccaccccaggtgtcctgtccattctca

SEQ ID NO: 24250 - DNA, 201 bp, Homo sapiens
attccttcaactgacatttgtttctgctaggtatataactgtttttgcatttagaaagcatcattaaagtaaaaacagaaaaatttcgggccttgtggtgyatatgttctagatgcaagcttgtccaacccgcggctcgtgggctgcatgtggcccaggacaattttgaatgtgaggacttttttgcttatctgtggtgca

SEQ ID NO: 24251 - DNA, 201 bp, Homo sapiens
cagctcttctgagtccctcagcctccactcaggtcaggaccagaagacactgttccctcctcagggactagaattttccacggataggagattatcccagrtacctgtgtccaggttggcgtctgggttctgtgctcccttccccaccccaggtgtcctgtccattctcaggatggccacatgcgtgctgctggagtgtct

SEQ ID NO: 24252 - DNA, 201 bp, Homo sapiens
cctcagcctccactcaggtcaggaccagaagacactgttccctcctcagggactagaattttccacggataggagattatcccaggtacctgtgtccaggytggcgtctgggttctgtgctcccttccccaccccaggtgtcctgtccattctcaggatggccacatgcgtgctgctggagtgtctcatgagagatgcaaa

SEQ ID NO: 24253 - DNA, 201 bp, Homo sapiens
tctgctaggtatataactgtttttgcatttagaaagcatcattaaagtaaaaacagaaaaatttcgggccttgtggtgcatatgttctagatgcaagcttrtccaacccgcggctcgtgggctgcatgtggcccaggacaattttgaatgtgaggacttttttgcttatctgtggtgcacctgagtcccggagtgagtgca

SEQ ID NO: 24254 - DNA, 201 bp, Homo sapiens; identical to SEQ ID NO: 12673

SEQ ID NO: 24255 - DNA, 201 bp, Homo sapiens
tataactgtttttgcatttagaaagcatcattaaagtaaaaacagaaaaatttcgggccttgtggtgcatatgttctagatgcaagcttgtccaacccgcrgctcgtgggctgcatgtggcccaggacaattttgaatgtgaggacttttttgcttatctgtggtgcacctgagtcccggagtgagtgcacccacctccct

SEQ ID NO: 24256 - DNA, 201 bp, Homo sapiens
agcctccactcaggtcaggaccagaagacactgttccctcctcagggactagaattttccacggataggagattatcccaggtacctgtgtccaggttggygtctgggttctgtgctcccttccccaccccaggtgtcctgtccattctcaggatggccacatgcgtgctgctggagtgtctcatgagagatgcaaagtgc

SEQ ID NO: 24257 - DNA, 201 bp, Homo sapiens
gcatcattaaagtaaaaacagaaaaatttcgggccttgtggtgcatatgttctagatgcaagcttgtccaacccgcggctcgtgggctgcatgtggcccargacaattttgaatgtgaggacttttttgcttatctgtggtgcacctgagtcccggagtgagtgcacccacctccctcagggtcaggagtgaatgctttag

SEQ ID NO: 24258 - DNA, 201 bp, Homo sapiens
ctcccttccccaccccaggtgtcctgtccattctcaggatggccacatgcgtgctgctggagtgtctcatgagagatgcaaagtgcctgaattttctgacwcttcctgttagacccccccaccaagacacatatgatccaccattccatctctgactataaggccaccctgaggtgctgggccctgggcttctaccctgtg

SEQ ID NO: 24259 - DNA, 201 bp, Homo sapiens; identical to SEQ ID NO: 12675

SEQ ID NO: 24260 - DNA, 201 bp, Homo sapiens
aaagtaaaaacagaaaaatttcgggccttgtggtgcatatgttctagatgcaagcttgtccaacccgcggctcgtgggctgcatgtggcccaggacaattytgaatgtgaggacttttttgcttatctgtggtgcacctgagtcccggagtgagtgcacccacctccctcagggtcaggagtgaatgctttaggaaccctc

SEQ ID NO: 24261 - DNA, 201 bp, Homo sapiens
tcctgtccattctcaggatggccacatgcgtgctgctggagtgtctcatgagagatgcaaagtgcctgaattttctgactcttcctgttagacccccccascaagacacatatgatccaccattccatctctgactataaggccaccctgaggtgctgggccctgggcttctaccctgtggagatcacactgacctggcag

SEQ ID NO: 24262 - DNA, 201 bp, Homo sapiens; identical to SEQ ID NO: 12676

SEQ ID NO: 24263 - DNA, 201 bp, Homo sapiens
tgcgtgctgctggagtgtctcatgagagatgcaaagtgcctgaattttctgactcttcctgttagacccccccaccaagacacatatgatccaccattccrtctctgactataaggccaccctgaggtgctgggccctgggcttctaccctgtggagatcacactgacctggcagcaggatggagaggaccagactcggga

SEQ ID NO: 24264 - DNA, 201 bp, Homo sapiens; identical to SEQ ID NO: 12677

SEQ ID NO: 24265 - DNA, 201 bp, Homo sapiens; identical to SEQ ID NO: 12678

SEQ ID NO: 24266 - DNA, 201 bp, Homo sapiens; identical to SEQ ID NO: 9350

SEQ ID NO: 24267 - DNA, 201 bp, Homo sapiens; identical to SEQ ID NO: 9331

SEQ ID NO: 24268 - DNA, 201 bp, Homo sapiens; identical to SEQ ID NO: 9351

SEQ ID NO: 24269 - DNA, 201 bp, Homo sapiens; identical to SEQ ID NO: 9332

SEQ ID NO: 24270 - DNA, 201 bp, Homo sapiens; identical to SEQ ID NO: 9352

SEQ ID NO: 24271 - DNA, 201 bp, Homo sapiens; identical to SEQ ID NO: 9353

SEQ ID NO: 24272 - DNA, 201 bp, Homo sapiens; identical to SEQ ID NO: 9284

SEQ ID NO: 24273 - DNA, 201 bp, Homo sapiens; identical to SEQ ID NO: 8463

SEQ ID NO: 24274 - DNA, 201 bp, Homo sapiens; identical to SEQ ID NO: 9326

SEQ ID NO: 24275 - DNA, 201 bp, Homo sapiens; identical to SEQ ID NO: 9343

SEQ ID NO: 24276 - DNA, 201 bp, Homo sapiens; identical to SEQ ID NO: 9327

SEQ ID NO: 24277 - DNA, 201 bp, Homo sapiens; identical to SEQ ID NO: 9344

SEQ ID NO: 24278 - DNA, 201 bp, Homo sapiens; identical to SEQ ID NO: 9328

SEQ ID NO: 24279 - DNA, 201 bp, Homo sapiens; identical to SEQ ID NO: 9346

SEQ ID NO: 24280 - DNA, 201 bp, Homo sapiens; identical to SEQ ID NO: 9348

SEQ ID NO: 24281 - DNA, 201 bp, Homo sapiens; identical to SEQ ID NO: 9329

SEQ ID NO: 24282 - DNA, 201 bp, Homo sapiens; identical to SEQ ID NO: 9349

SEQ ID NO: 24283 - DNA, 201 bp, Homo sapiens; identical to SEQ ID NO: 9330

SEQ ID NO: 24284 - DNA, 201 bp, Homo sapiens; identical to SEQ ID NO: 8088

SEQ ID NO: 24285 - DNA, 201 bp, Homo sapiens; identical to SEQ ID NO: 8126

SEQ ID NO: 24286 - DNA, 201 bp, Homo sapiens; identical to SEQ ID NO: 8090

SEQ ID NO: 24287 - DNA, 201 bp, Homo sapiens; identical to SEQ ID NO: 8643

SEQ ID NO: 24288 - DNA, 201 bp, Homo sapiens; identical to SEQ ID NO: 9951

SEQ ID NO: 24289 - DNA, 201 bp, Homo sapiens; identical to SEQ ID NO: 8785

SEQ ID NO: 24290 - DNA, 201 bp, Homo sapiens; identical to SEQ ID NO: 9954

SEQ ID NO: 24291 - DNA, 201 bp, Homo sapiens; identical to SEQ ID NO: 8792

SEQ ID NO: 24292 - DNA, 201 bp, Homo sapiens; identical to SEQ ID NO: 9957

SEQ ID NO: 24293 - DNA, 201 bp, Homo sapiens; identical to SEQ ID NO: 8097

SEQ ID NO: 24294 - DNA, 201 bp, Homo sapiens; identical to SEQ ID NO: 9960

SEQ ID NO: 24295 - DNA, 201 bp, Homo sapiens; identical to SEQ ID NO: 8100

SEQ ID NO: 24296 - DNA, 201 bp, Homo sapiens; identical to SEQ ID NO: 8137

SEQ ID NO: 24297 - DNA, 201 bp, Homo sapiens; identical to SEQ ID NO: 9965

SEQ ID NO: 24298 - DNA, 201 bp, Homo sapiens; identical to SEQ ID NO: 9968

SEQ ID NO: 24299 - DNA, 201 bp, Homo sapiens; identical to SEQ ID NO: 9970

SEQ ID NO: 24300 - DNA, 201 bp, Homo sapiens; identical to SEQ ID NO: 9973

SEQ ID NO: 24301 - DNA, 201 bp, Homo sapiens; identical to SEQ ID NO: 9974

SEQ ID NO: 24302 - DNA, 201 bp, Homo sapiens; identical to SEQ ID NO: 8107

SEQ ID NO: 24303 - DNA, 201 bp, Homo sapiens; identical to SEQ ID NO: 9312

SEQ ID NO: 24304 - DNA, 201 bp, Homo sapiens; identical to SEQ ID NO: 9314

SEQ ID NO: 24305 - DNA, 201 bp, Homo sapiens; identical to SEQ ID NO: 8437

SEQ ID NO: 24306 - DNA, 201 bp, Homo sapiens; identical to SEQ ID NO: 9202

SEQ ID NO: 24307 - DNA, 201 bp, Homo sapiens; identical to SEQ ID NO: 9205

SEQ ID NO: 24308 - DNA, 201 bp, Homo sapiens; identical to SEQ ID NO: 9208

SEQ ID NO: 24309 - DNA, 201 bp, Homo sapiens; identical to SEQ ID NO: 9210

SEQ ID NO: 24310 - DNA, 201 bp, Homo sapiens; identical to SEQ ID NO: 9212

SEQ ID NO: 24311 - DNA, 201 bp, Homo sapiens; identical to SEQ ID NO: 9215

SEQ ID NO: 24312 - DNA, 201 bp, Homo sapiens; identical to SEQ ID NO: 9185

SEQ ID NO: 24313 - DNA, 201 bp, Homo sapiens; identical to SEQ ID NO: 8946

SEQ ID NO: 24314 - DNA, 201 bp, Homo sapiens
taaacatcttataatgatgtaatttgctttgactgtaagtgtagaacaggacgctgttcctgaatcaggaaacaagggactggtgacctgaactgccaccmccctccctggtgctcagatgcaatgaaatcgtgaggcaacaaatctatggctaggtaaagggtcaactccatttcagcaaatgtttcagatgttccttcc

SEQ ID NO: 24315 - DNA, 201 bp, Homo sapiens
agaacccacatcaaaaaaccgaattcctagctcaggtgagatcaccaaagttgcctgtgaggcttcgtggaacctgcaggtagaaaggacatctttatttygagctgcagcccagttgcttctgcgtcttggagccccttgaaaggaccctctcccttcaacagtacatagggaggccatttctggggagaaatgtagact

SEQ ID NO: 24316 - DNA, 201 bp, Homo sapiens
atccttcctacacaaagcgaagctgaaaaaaagtgcaggacactccatttcctcctgggaccagacagggaagccagagccaccatggatgtcaaattccrgcaaggaaacaccagtatagcaaaatctccacatcacattttaaagctcacacaatggctcaaagagaacccacatcaaaaaaccgaattcctagctcag

SEQ ID NO: 24317 - DNA, 201 bp, Homo sapiens
aggcaacaaatctatggctaggtaaagggtcaactccatttcagcaaatgtttcagatgttccttcctgcctagtaatgttccagctttaccccagccttratcttttaaaatgtatattttccttagcgttgattttaaagtaattcgtatgtatttattacactgggtttgttgcagtaagccacctcgaatgttgctg

SEQ ID NO: 24318 - DNA, 201 bp, Homo sapiens
ctgggacagttatattcatcagaacagcacggtgtcaaggccctcacccccagaaagcttaggagacactgttttatggaggagagtgagattggaggaasccctgactccaggtctcctgatccttcctacacaaagcgaagctgaaaaaaagtgcaggacactccatttcctcctgggaccagacagggaagccagagc

SEQ ID NO: 24319 - DNA, 201 bp, Homo sapiens
gactgtaagtgtagaacaggacgctgttcctgaatcaggaaacaagggactggtgacctgaactgccaccaccctccctggtgctcagatgcaatgaaatygtgaggcaacaaatctatggctaggtaaagggtcaactccatttcagcaaatgtttcagatgttccttcctgcctagtaatgttccagctttaccccagc

SEQ ID NO: 24320 - DNA, 201 bp, Homo sapiens
cagtcggtattttgtgcacctgtgcttttatttcaggagctgggacagttatattcatcagaacagcacggtgtcaaggccctcacccccagaaagcttargagacactgttttatggaggagagtgagattggaggaagccctgactccaggtctcctgatccttcctacacaaagcgaagctgaaaaaaagtgcaggac

SEQ ID NO: 24321 - DNA, 201 bp, Homo sapiens
atttgctttgactgtaagtgtagaacaggacgctgttcctgaatcaggaaacaagggactggtgacctgaactgccaccaccctccctggtgctcagatgyaatgaaatcgtgaggcaacaaatctatggctaggtaaagggtcaactccatttcagcaaatgtttcagatgttccttcctgcctagtaatgttccagctt

SEQ ID NO: 24322 - DNA, 201 bp, Homo sapiens
ataaaccacaatgcctggcccctgtgtgtgtacatacaaagtcaaagtgctaaacctggcgcctaggaaacatccccacctaggcattgcttgcaacagtmggtattttgtgcacctgtgcttttatttcaggagctgggacagttatattcatcagaacagcacggtgtcaaggccctcacccccagaaagcttaggaga

SEQ ID NO: 24323 - DNA, 201 bp, Homo sapiens
cttataatgatgtaatttgctttgactgtaagtgtagaacaggacgctgttcctgaatcaggaaacaagggactggtgacctgaactgccaccaccctccstggtgctcagatgcaatgaaatcgtgaggcaacaaatctatggctaggtaaagggtcaactccatttcagcaaatgtttcagatgttccttcctgcctag

SEQ ID NO: 24324 - DNA, 201 bp, Homo sapiens
tcttgaacttctggcttcaaacaattctcatgcctcagcctcccaaagtgctgagattacaggcataaaccacaatgcctggcccctgtgtgtgtacatasaaagtcaaagtgctaaacctggcgcctaggaaacatccccacctaggcattgcttgcaacagtcggtattttgtgcacctgtgcttttatttcaggagct

SEQ ID NO: 24325 - DNA, 201 bp, Homo sapiens
tcttataatgatgtaatttgctttgactgtaagtgtagaacaggacgctgttcctgaatcaggaaacaagggactggtgacctgaactgccaccaccctcyctggtgctcagatgcaatgaaatcgtgaggcaacaaatctatggctaggtaaagggtcaactccatttcagcaaatgtttcagatgttccttcctgccta

SEQ ID NO: 24326 - DNA, 201 bp, Homo sapiens
tttttttttttttttgtagagactgggtcttgctttgttacccatgctggtcttgaacttctggcttcaaacaattctcatgcctcagcctcccaaagtgmtgagattacaggcataaaccacaatgcctggcccctgtgtgtgtacatacaaagtcaaagtgctaaacctggcgcctaggaaacatccccacctaggcat

SEQ ID NO: 24327 - DNA, 201 bp, Homo sapiens
ttcaacagtacatagggaggccatttctggggagaaatgtagactgtccttagactcctgaggtttttacacttgcttgctgactctgtggactttgactwcatcattaaacatcttataatgatgtaatttgctttgactgtaagtgtagaacaggacgctgttcctgaatcaggaaacaagggactggtgacctgaact

SEQ ID NO: 24328 - DNA, 201 bp, Homo sapiens
gaattcctagctcaggtgagatcaccaaagttgcctgtgaggcttcgtggaacctgcaggtagaaaggacatctttatttcgagctgcagcccagttgctyctgcgtcttggagccccttgaaaggaccctctcccttcaacagtacatagggaggccatttctggggagaaatgtagactgtccttagactcctgaggtt

SEQ ID NO: 24329 - DNA, 201 bp, Homo sapiens
gggtcaactccatttcagcaaatgtttcagatgttccttcctgcctagtaatgttccagctttaccccagccttaatcttttaaaatgtatattttccttrgcgttgattttaaagtaattcgtatgtatttattacactgggtttgttgcagtaagccacctcgaatgttgctgtagaattaaagtaagcaaataaatgt

SEQ ID NO: 24330 - DNA, 201 bp, Homo sapiens
gtcaactccatttcagcaaatgtttcagatgttccttcctgcctagtaatgttccagctttaccccagccttaatcttttaaaatgtatattttccttagygttgattttaaagtaattcgtatgtatttattacactgggtttgttgcagtaagccacctcgaatgttgctgtagaattaaagtaagcaaataaatgtgt

SEQ ID NO: 24331 - DNA, 201 bp, Homo sapiens
gggtgggccgtgcagcagggcgcagcgaggcggacatccaaacagcggaactcagacgctgactccgagcgcaccccgggccttcccatttcatacacccwcgaggatgagacccaagcacctccaaggaatagcacccgaggtcttcaggacaccgaccggtagccatggccagatgcccggccaaccccttcagcgtgg

SEQ ID NO: 24332 - DNA, 201 bp, Homo sapiens
tctttagctgttgctttttttattgattggtaaaaagtctttatgtaataactcctgtcatattttgggaaggtgtagaagttgaaattttaggaatcacrgaacacccagaaataatgttcaaagacagcaaaccttgaaaacctataatgtgtgtgtgtgttcacagctccgccgcatgcaagagatgattgcaaggat

SEQ ID NO: 24333 - DNA, 201 bp, Homo sapiens
cccagcagctttatgtacaatttaccaagtaattttaattactgctatttcttctatgtacttgatgggtggttttttttctcatgagaatgtcatgtgcrtgatgccaccttggtgcattcctcttctctttcagcacccacatgcaggatctccaggaggtgacccaggaccttcattatgaaaacttccgttctgaga

SEQ ID NO: 24334 - DNA, 201 bp, Homo sapiens
cgactaggccctgtctgcgggtaccttcggcgaggagaggcgacgaaggtctgcaccagcgaggcacggacaggcagcagggggtagggtatagggttggrggccgccgagttggcccggggatgaggagcaaacctgtggcttccgtggtctcagtggagtcccaactgtgacctggcctactggcccagacaaacctgg

SEQ ID NO: 24335 - DNA, 201 bp, Homo sapiens
tcatccagactgagaaatgtgtaaattattttttactcatcacttctgactcctctgctcacttttaaatagcttactaactgtttccgaactcttctctyctccaaagtgtaagctccatctttatgaggccagcataggacaaaagatgaggttagcatggatggatagtagaccaggaaaggggccgtaagatgagga

SEQ ID NO: 24336 - DNA, 201 bp, Homo sapiens
tcccagtcatttagtctagttttgaataaagaatagggggtctggttaatatatacatctaaacacaaaagtcagaaagaataaaagtagtgatgttacaygagccagctgtcagtgcttaacttttccctttggcctaatgcatttggaaggtcctgaaattgtattttctttttacattgcctatgtatgtgtaagtct

SEQ ID NO: 24337 - DNA, 201 bp, Homo sapiens
agctcatttgaagcaggaagcagtgacaggtgtttgcttattttctctgagcttcattttcaacctttatggaatgaaaattttacttttagatcgataamattttatttctgtatactttctagttttgcagcatttccagtttccaggagcctcatgaatggctttttggtttagttaactttgtggtcatgtaagccc

SEQ ID NO: 24338 - DNA, 201 bp, Homo sapiens
gattgtttatataggcaaaatggaggtgccaaacagaattataacattttcggaactaaggctcatttaaagatacaaatttgattggctactattgattrcacttgaagggatttgtttaacttccttttgtaaagaagtaacagtcataaggatctctcatctcccagtcatttagtctagttttgaataaagaatagg

SEQ ID NO: 24339 - DNA, 201 bp, Homo sapiens
atattggccgggcgcggtggctcacgcttgtaatcccagcactttgggaggcggaggcgggtggatcacgaggtcaggagtttgagaccagcctgaccaaygtggtgaaaccccgtctctactgaaaatacaaaaatcagctgggcgtggtggtgtgtgcctgtaatcccagctactcaggaggctgaggcaggagaatcg

SEQ ID NO: 24340 - DNA, 201 bp, Homo sapiens
gccactacactccagcccgtgcgacagagtgagacaccatctcaatataaaaagagaaatgataaatacatgtcattttaaattttaaagtagaatttttkgggggggtagcaaataactatttgttgcagtgttatgattctgatttctttcgattcttaggaaagtggagaatgaggacatgaataaagaccagatctt

SEQ ID NO: 24341 - DNA, 201 bp, Homo sapiens
tgagaccctgtctcaacaacaaaagtttcctgtgttgtaattcattaaaattctcacattctaataatttgatggatttctagatacatatgttgtacacrttgaagtctaattatgagtttggaaatgagacattaagaaagattttagaggcagcaagaaaattccaccctctggaagctgagtaggcgctggccctga

SEQ ID NO: 24342 - DNA, 201 bp, Homo sapiens
tggcgggcatctgtagtcccagccactcaggaggctgaagcaaaagaatcgcttcaacccaggaggcagaggttgtttgcagtccagcctgggtgacagagcaagactccgtctcaagaaaaaaaaaaaagaatttctgtaattacccacagaaagaacaactgttaagtatatatccttctagaacatagcttatgtttt

SEQ ID NO: 24343 - DNA, 201 bp, Homo sapiens
caaacctttttatattttatactgcactttagtgtattttctgtcactgtaggtatagaagatctgcctcccctgtggaaattggggtctgttggtgggcktgcccctgaagcctggcttgggttgaaaagtgttcccgccctaaggccttggtgccctgaacctctgatgcctaccgggttctcctgatttgagtttcct

SEQ ID NO: 24344 - DNA, 201 bp, Homo sapiens
ctgtgtcaaacacaatttaatggttgtgtaagaagttaagcgcactcagcccctccagggctgcatccttgtggctatcctgatccccattattgaggggrgtgtagaggctgaagacagggtttggggactttactttagtgtcagttgtgtgtttctcacaatgaggtagagtgagccactccttggctatctcaatcc

SEQ ID NO: 24345 - DNA, 201 bp, Homo sapiens
ctatgtctgctaaatcagatgtatttgttgtattactcagttcttctctgtccttgcacatactgtgtttactgaatctgtccggttctcagagaactctrttaaagtttctcacttgaatttttttttttaagtttgtatttttcctagtccttgctttatgtgtttatctacagtgattatttgaatatacaggcttat

SEQ ID NO: 24346 - DNA, 201 bp, Homo sapiens
tgagccgagatcgcgcctctgcactctagcctggcgacagagcaagactctgtctcaaaaaaaaaaaaaatttgatacagctatcacctaaagcttagaawttttattgtaggtttaatttgttttcgtacaatttgtcccatgtagaaagtatctgacacttttcaagaaaatgttacatacccccagctttccaattca

SEQ ID NO: 24347 - DNA, 201 bp, Homo sapiens
aagaattaagataatttgagagagaagagttttgtatgtattttttttaaataagtgacaattctaaaattaattttagacttaagcccttagatgtggcrtttatgaaggcaatacacaacaaggtgaatattgtgcctgtcattgcaaaagctgacactctcaccctgaaggaacgggagcggctgaagaaaagggtga

SEQ ID NO: 24348 - DNA, 201 bp, Homo sapiens
ggcatgtatacttaatactgaatttctttgatttaactgacttaacaactgactaaccattgatgagcactcctgatttttatctagaacattcagatttrccataatgttccttagtggtagaggtgtgtgcctagtgatgtagaaagatacactgacttggtgcaaggccatctgcttaccacatcacaccacttggag

SEQ ID NO: 24349 - DNA, 201 bp, Homo sapiens
taatcccagcaccttgggaggctgaggcgggcgggtcatgaggtcaggagatcgagaccatcctggctaacacagtgaaaccccatctctactaaaaattwaaaaaaaattagccgggcatggtggcgggcgcctgtagtcccagctactcgggaggctgaggcaggagaagggcgtgaacccaggaggtggaggttgcag

SEQ ID NO: 24350 - DNA, 201 bp, Homo sapiens
tcatactgcaaacatagtagtactgtaggtactaaacacagaatgatgtttgtgaggtacttagcccagtaccaggccttatgtaaacacttaaccgattsaatggtgtcatatgaataaggtcatgacaaggtttttctttttatttaaaggtgaatcaggtctaggaaaatcgactctcataaacagcctattcctaac

SEQ ID NO: 24351 - DNA, 201 bp, Homo sapiens
gggaggctgaggcgggcgggtcatgaggtcaggagatcgagaccatcctggctaacacagtgaaaccccatctctactaaaaattaaaaaaaaattagccrggcatggtggcgggcgcctgtagtcccagctactcgggaggctgaggcaggagaagggcgtgaacccaggaggtggaggttgcagtgagctgagatcacc

SEQ ID NO: 24352 - DNA, 201 bp, Homo sapiens
caagattgcaccactgcactccagcctgggcgacagagcgagactctgtctcaaaaaaataataaattaaataaataaatttcacatattgtaacatgcayacattgcttttactcttgaaaaaagaggctgaggccgggtgcggtggctcatgcctgtactcctggcattttgggaggcccaggcgggcggatcacttga

SEQ ID NO: 24353 - DNA, 201 bp, Homo sapiens
ctttcttttctctacacacatcagtaacagtcctttggcccccttagttcattcccagcagaccagataatttagaattctgataatttattatgatgaamttgatggggctcttagacttgataaattggtttaaatcagcctttgcaagttagttcagagataaattagtgctaaagaacatattctgagaaaagcaga

SEQ ID NO: 24354 - DNA, 201 bp, Homo sapiens
tccatttccctggatcctgaatcaataggaacgtgttacaatgtttgctcattcttgcctgcttttaagtattttgaataagctaggcaattaaaaaaaawtttttaagagtgcttcataagatgaatggaaggttaagttgctgactaatattcttggatccagaatattagtccttcactttatggtcttgtacatagc

SEQ ID NO: 24355 - DNA, 201 bp, Homo sapiens
tggtcttgaactcctgacctcaagtggtctgcctacctcggcctcccaaagtgctggaattacaggcgtgagcatcacgtctggcctaatttttttaatcraatttatttttgtaatgatagatgcttgtcttattcctagggaaatatttgaagtaattgagatgctgtcacctaaaataatcaaaaggctcctgattca

SEQ ID NO: 24356 - DNA, 201 bp, Homo sapiens
attcttgaaatcatccagactgagaaatgtgtaaattattttttactcatcacttctgactcctctgctcacttttaaatagcttactaactgtttccgarctcttctctcctccaaagtgtaagctccatctttatgaggccagcataggacaaaagatgaggttagcatggatggatagtagaccaggaaaggggccgt

SEQ ID NO: 24357 - DNA, 201 bp, Homo sapiens
tgttttcagactgttgacagtcgggacttatatgattcattatttttaatacaactgatacatttgattcattaacacaaagagttctaatttagttgtctttttttttttttttgagacgggagtcttgttctgtcaccaggctggagtgcagtggcatgatctcagctcactgcaacttctgcctcccacgttcaagcg

SEQ ID NO: 24358 - DNA, 201 bp, Homo sapiens
gctacaccaaagaatggtgattagcgctcccagggtggggaaaaatgaggattgtttatataggcaaaatggaggtgccaaacagaattataacattttcrgaactaaggctcatttaaagatacaaatttgattggctactattgattacacttgaagggatttgtttaacttccttttgtaaagaagtaacagtcataa

SEQ ID NO: 24359 - DNA, 201 bp, Homo sapiens
gttttgaataaagaatagggggtctggttaatatatacatctaaacacaaaagtcagaaagaataaaagtagtgatgttacacgagccagctgtcagtgcytaacttttccctttggcctaatgcatttggaaggtcctgaaattgtattttctttttacattgcctatgtatgtgtaagtcttcttcaggtcagttcacg

SEQ ID NO: 24360 - DNA, 201 bp, Homo sapiens
cctttggtacattgtgaacagtctaatatatggattatattcacagagaagacaggaaagcaaaaaaaaaaaacatgaaaaaataatgcctgggaattgtscaattttcagcaaagttgtaaatgcacagatccaagaagcttgacaaataccaggcaaaataaatataaagaaaactacaccaggacgcatcataacacg

SEQ ID NO: 24361 - DNA, 201 bp, Homo sapiens
tgggtaagtaattgtttatcgtggagaaatgctttactacatgggtttgtaagttttacccaaactgtgtattttaatataagaattaagataatttgagrgagaagagttttgtatgtattttttttaaataagtgacaattctaaaattaattttagacttaagcccttagatgtggcgtttatgaaggcaatacacaa

SEQ ID NO: 24362 - DNA, 201 bp, Homo sapiens
attgaagataagaggagtgaccactgaattgtcattaggaataacataactggtcgggcgtgatggctcatgcctgtaatcccagcactctgggaggccaragcgggtggatcatttgaggtcaggagtttgagaccagcctggccaacatggcaaaaccccatctctactaaaaatacaaaaacctgggcgtggtggtgc

SEQ ID NO: 24363 - DNA, 201 bp, Homo sapiens
gttcacgccattctcccacctcagcctccaagtagctaagattacaggcacccgccaccacacctggctaattttgtttctgtatttttagtagagacggkgtttcaccgtgttagccatgatggtctcgatctcctgacttcgtgatccgcccgcctcggcctctcaaagcgctaggattaatataaatcttacacagac

SEQ ID NO: 24364 - DNA, 201 bp, Homo sapiens
ggtagggggatacagcagggggttcaggcaggaggatcacttgagcccagaagttggaggccaacctcagcaacatagcaatacgctgtctctaaaaaaawatatatatatattttatatatataatatataattaataaatatatataatatatattacatatatattatatctatattatttatattacatatgtaata

SEQ ID NO: 24365 - DNA, 201 bp, Homo sapiens
cctggctatggtgacgctatcaactgcagagattggtatgctcccccatgcccagggatctgcatttgtttacttaatatacttcataaatttatagatartgttaatgagtgattattaagtttgggattgctgtatataataaaacacctagacaatttaaagcgtgttaaatgttgactttttaaataaggaatttta

SEQ ID NO: 24366 - DNA, 201 bp, Homo sapiens
attatatatattatatatataatatatattataaatataatatataaatatatttataaatatatataaatattatatttatacattatatttatatacatattatatatacatttttatatattatatatatataaatataatatacatatattttttaaaataaaagagtttctaggccgagtgtggtggctcacgcct

SEQ ID NO: 24367 - DNA, 201 bp, Homo sapiens
ttatatatattatatatataatatatattataaatataatatataaatatatttataaatatatataaatattatatttatacattatatttatatacatattatatatacatttttatatattatatatatataaatataatatacatatattttttaaaataaaagagtttctaggccgagtgtggtggctcacgcctg

SEQ ID NO: 24368 - DNA, 201 bp, Homo sapiens
tatatatattatatatataatatatattataaatataatatataaatatatttataaatatatataaatattatatttatacattatatttatatacatattatatatacatttttatatattatatatatataaatataatatacatatattttttaaaataaaagagtttctaggccgagtgtggtggctcacgcctgt

SEQ ID NO: 24369 - DNA, 201 bp, Homo sapiens
cacctcactagacatttccacggccatactcattatcctgaaatcccagcagctttatgtacaatttaccaagtaattttaattactgctatttcttctaygtacttgatgggtggttttttttctcatgagaatgtcatgtgcgtgatgccaccttggtgcattcctcttctctttcagcacccacatgcaggatctcca

SEQ ID NO: 24370 - DNA, 201 bp, Homo sapiens
tcctaaattgtctcaagtgcctgccagttttttagaaagtatttgaacctttgaagaacccctggaagcgtagacgtttttatgctaataaatactttagyaattcctacttaagggaacttcaccttttgtactctgctatattaaatttctttgaggtagaaatgggggtggtgtcagggttagaatgctgtaattcta

SEQ ID NO: 24371 - DNA, 201 bp, Homo sapiens
tttatctttgaatcctgtgggtgttcattactgtccaatgcaaaatcatcataccagtttttgcattttataccagtgttagcatggaacacagataagcaaaaaaaaaaagtcattatttcaccactcaggaataaccactgttaatatgttacatatattctttttcacctgtgtgtgcatttgactatacatttacaa

SEQ ID NO: 24372 - DNA, 201 bp, Homo sapiens
taattttcagtcgcatacaactaaggagttatactagataagtttttctttttttaatgctcctagttgaatactactggttttctgatagaagtatgacyttctggaagtgtttatactttttaaaaaatttgtgaaaactgataacctatgtttgtttcatgtctaactgattatatcttaaaagcaactactaaggtg

SEQ ID NO: 24373 - DNA, 201 bp, Homo sapiens
agtttttctttttttaatgctcctagttgaatactactggttttctgatagaagtatgaccttctggaagtgtttatactttttaaaaaatttgtgaaaamtgataacctatgtttgtttcatgtctaactgattatatcttaaaagcaactactaaggtgtttattagtttgtttgttttttaatcttatttagcaacag

SEQ ID NO: 24374 - DNA, 201 bp, Homo sapiens
caagctacgcctgacagtggtagatacccctggctatggtgacgctatcaactgcagagattggtatgctcccccatgcccagggatctgcatttgtttasttaatatacttcataaatttatagatagtgttaatgagtgattattaagtttgggattgctgtatataataaaacacctagacaatttaaagcgtgttaa

SEQ ID NO: 24375 - DNA, 201 bp, Homo sapiens
acatattatatatacatttttatatattatatatatataaatataatatacatatattttttaaaataaaagagtttctaggccgagtgtggtggctcacrcctgtaatcccagcactttggaaggctgaggcaggcacatcaccagaggtcaggaggtcgagaccagcctggccaacatggcaaaactccgtctctaaaa

SEQ ID NO: 24376 - DNA, 201 bp, Homo sapiens
tacatttttatatattatatatatataaatataatatacatatattttttaaaataaaagagtttctaggccgagtgtggtggctcacgcctgtaatcccwgcactttggaaggctgaggcaggcacatcaccagaggtcaggaggtcgagaccagcctggccaacatggcaaaactccgtctctaaaaaattacaaaagt

SEQ ID NO: 24377 - DNA, 201 bp, Homo sapiens; identical to SEQ ID NO: 6428

SEQ ID NO: 24378 - DNA, 201 bp, Homo sapiens; identical to SEQ ID NO: 6446

SEQ ID NO: 24379 - DNA, 201 bp, Homo sapiens; identical to SEQ ID NO: 6450

SEQ ID NO: 24380 - DNA, 201 bp, Homo sapiens; identical to SEQ ID NO: 6278

SEQ ID NO: 24381 - DNA, 201 bp, Homo sapiens; identical to SEQ ID NO: 6426

SEQ ID NO: 24382 - DNA, 201 bp, Homo sapiens
ctattccagggaacccaccaagacagaagaggagaaaaaaggaggggacgtgaggagaggtgtgagttctcacctggagctggagggctgtcgctttcggsggggttggggagactcttccttctcacggcctccagggacagatgtgaagaaaaggcggaaacctaagattcaatggggcagagtcaaacaaaaacaaaa

SEQ ID NO: 24383 - DNA, 201 bp, Homo sapiens
gtaggaaggcgccatctgtactgggaagagggctctccccagacactgaatctgctggtgccttgatcttggacttctcagcctccaaaatgtgagaaatmcatttattttgtttataagctacccagtttatgttattttgttatagcagcccatatggactcaaacaggttgtatccttgacacctactttaggaatgc

SEQ ID NO: 24384 - DNA, 201 bp, Homo sapiens
tggtggcagcgacagccgagtcgacactggccaccttcttggctttctttttcaacttccttttcttctttgcctccttctccactgttccagggctgtgratggctgactcctgtaggatgtcggacgccgacacagctgcctcccggcaccgccgccactcctcgtcactgtcctcactgctgcaacgagagggtaccc

SEQ ID NO: 24385 - DNA, 201 bp, Homo sapiens
gcaactatgatcaagtgaggtgtctggcccaagacaggtgctcaaaagcagtaaacatccaaagctgccgccaagagggctttccctcccgctgagctcaygatttctccagctgcctgacagggccactgccttggcctggtcctgactggagtctgcttggctattccagggaacccaccaagacagaagaggagaaaa

SEQ ID NO: 24386 - DNA, 201 bp, Homo sapiens
caggtatagctgtagcactctttgctggtgggaatggagaggtctcgctggccttctttgcctttttcttctttttggtcccaagcgacacctggtccccrttgagctcacctgacttctgcttctggactgtggccatgctggtgggggtggtggcagcgacagccgagtcgacactggccaccttcttggctttctttt

SEQ ID NO: 24387 - DNA, 201 bp, Homo sapiens
tctactgcagaaacatctctgtgactcagtgcaatgccaagcaggccctgttcagcctgaagccagagagtcacaaaggaaaactgctcccacaggctgawatgcagctgccttcctaaacacctcctctactttctccaattgaggggaaccctgtgggattcaggctgcggggctctggcccatcattctgtctcagaa

SEQ ID NO: 24388 - DNA, 201 bp, Homo sapiens
ccatgctggtgggggtggtggcagcgacagccgagtcgacactggccaccttcttggctttctttttcaacttccttttcttctttgcctccttctccacwgttccagggctgtggatggctgactcctgtaggatgtcggacgccgacacagctgcctcccggcaccgccgccactcctcgtcactgtcctcactgctgc

SEQ ID NO: 24389 - DNA, 201 bp, Homo sapiens
gcgggaggatagcttgaggccaggagtttaagaccagcctgggcaacatgacagaaccctgtctctaaaaaaaaatacaaaaattagccaggtgtggtggkgcacgcctgtagtcccagaactttggaaggctaaggtgggcagatggcttgaggccaggagttcaagaccagcctgggcaacatagcgagatcctgtctc

SEQ ID NO: 24390 - DNA, 201 bp, Homo sapiens
ggaggactgcttgggtccgggaggttgaggctgcattgagctataattgctccactgcactccagcctaggtggcagagagagttcctatctcaaaaaaaraaaaaaaaaaaagaatataccaaaactgtttcgcccacctccagacacacattaggtgcttaataaatgatagcttctattaagtataaccactcaccat

SEQ ID NO: 24391 - DNA, 201 bp, Homo sapiens
aaaatggatatcaagcacttgtggcacacggcctagccacaagtagctgctcagcaaatggtagctatgatgacgatgcagatgatgactgtcatcaagaraagcttcagccttcacaggctctctaacataaaaataaaccacatttctctagaggcacaaggccaggaagcatgtgtctggtgagtgcagatggagatg

SEQ ID NO: 24392 - DNA, 201 bp, Homo sapiens
ttgtggcacacggcctagccacaagtagctgctcagcaaatggtagctatgatgacgatgcagatgatgactgtcatcaagaaaagcttcagccttcacargctctctaacataaaaataaaccacatttctctagaggcacaaggccaggaagcatgtgtctggtgagtgcagatggagatgccactgtgcacagcagag

SEQ ID NO: 24393 - DNA, 201 bp, Homo sapiens
tgtcctcactgctgcaacgagagggtaccctgggttagctggagtcaggacacagccccagagctgcctctcgctgtcctcccttggtccaggtcaccagraggtggccgcagagagaggcaggtagtgagttcaggcttgggagtgaggccaacctggcttccaatactggcttctgggcgtagcagccttgtgacctcc

SEQ ID NO: 24394 - DNA, 201 bp, Homo sapiens
cctacctctcagggtcatcagaaggattaaatgagaaaatggacatcaagcacttagcacagagcctggccacaaacagttgctcagtaaatggtagctgygatgatgatgtgacttcaggcacacctgtctccttgctgacagcctgtttcctcacctggaggataaaggtaacaacaggacccacatgataatgttctt

SEQ ID NO: 24395 - DNA, 201 bp, Homo sapiens
agatctagaccagtgtatccccagacctgttccgcaggttgttgactggttttccatgaaacaaaggcactgtggccaaacaagtttggaaaatgctgggytaaacagttacacaggtctcttcactacaggaattctcagagccttgaatatactactctggcttgcagtctgcaaggacacgtggaggtatgtagattg

SEQ ID NO: 24396 - DNA, 201 bp, Homo sapiens
aatgccaagcaggccctgttcagcctgaagccagagagtcacaaaggaaaactgctcccacaggctgaaatgcagctgccttcctaaacacctcctctacwttctccaattgaggggaaccctgtgggattcaggctgcggggctctggcccatcattctgtctcagaagaatagctggttcacactttgggaaggctcat

SEQ ID NO: 24397 - DNA, 201 bp, Homo sapiens
ctactgcagaaacatctctgtgactcagtgcaatgccaagcaggccctgttcagcctgaagccagagagtcacaaaggaaaactgctcccacaggctgaamtgcagctgccttcctaaacacctcctctactttctccaattgaggggaaccctgtgggattcaggctgcggggctctggcccatcattctgtctcagaag

SEQ ID NO: 24398 - DNA, 201 bp, Homo sapiens
tggtggccatcaggggcatttggcaatgtctggagacatttttggatgtcacaactggtggggtgagtgctactatcatctagtaggtagaggccagggaygttggtaaacatcctataatgggaagaaggatagacccccacgacaaatgctagtcaaagatgtcagtagcgccaaggttgagagacactgacctaacac

SEQ ID NO: 24399 - DNA, 201 bp, Homo sapiens
tagaggcacaaggccaggaagcatgtgtctggtgagtgcagatggagatgccactgtgcacagcagagaacaaggctctcagcaatgccctcgaggcagaygcagcaatgccctgggtgctttccctaacctcccttcctgtatgccaaaggtgccccccaagccctgttcaggaaaagcaacccggggagagggagtaga

SEQ ID NO: 24400 - DNA, 201 bp, Homo sapiens
aagataaagagaaacaaaaaaaaaattttaagaagacacaaaataaaaaaatttaaaaaagaaacaataacaaaaaaacccaaccaagcaaacaaacaaaraaaacaaaggagcagagtcagcacccccagatgccagcccctcctcccaggtgccaggtgctgaagctgccccgcctctgccctcaggagctcctggtcc

SEQ ID NO: 24401 - DNA, 201 bp, Homo sapiens
caatctgtgttcatgtgttctcaatattcaactcccacttacaagtgagaacacacagtgtttggttttcttttcctgtgttagtttgctgaggatgatgkctttcagcttcatccatgtccctgcaaaggacacaatctcattcctttttatggctgcatagtattccatgatgtgtatgtaccacattttctttatcca

SEQ ID NO: 24402 - DNA, 201 bp, Homo sapiens
ccacttacaagtgagaacacacagtgtttggttttcttttcctgtgttagtttgctgaggatgatggctttcagcttcatccatgtccctgcaaaggacayaatctcattcctttttatggctgcatagtattccatgatgtgtatgtaccacattttctttatccagtctatcactgacaggcatttgggttggttccat

SEQ ID NO: 24403 - DNA, 201 bp, Homo sapiens
ttaataaacaccataataaatatatgaatatataaatataaaacattctaagggctttgactgaaaagaacaatatgatgtcaggagaaaaaaaaattgartcactaagaaaggtgtatctgaggaaatgacatttaagcagaagtttataaatccagtccaagaataagaaaaagaatattcatgcagtgggaataacat

SEQ ID NO: 24404 - DNA, 201 bp, Homo sapiens; identical to SEQ ID NO: 13603

SEQ ID NO: 24405 - DNA, 201 bp, Homo sapiens
atatttataatttatttaaagtgcactgagaagccattgcttgtttttaagcacaagagtgacaatgaaggctgaggaggtttgaatgaaggaaaataatkggttttgttttagattaacatgttgattttagatttctgtttttcatcacaattctggacctagacctattaacctcacaggagagttttgtgctggaga

SEQ ID NO: 24406 - DNA, 201 bp, Homo sapiens; identical to SEQ ID NO: 13605

SEQ ID NO: 24407 - DNA, 201 bp, Homo sapiens
gagtgttttacttccaattatgtggtcaattttcgaataagtgcgacgtggtgctgagaagaatgtatattctgttgatttggggtggagagttctgtagrtgtctattaggtccgcttggtccaaagctgagttcaactcctgaatatccttgttaattttctgtcttgttgatctgtctaatgttgacagtggggtgtt

SEQ ID NO: 24408 - DNA, 201 bp, Homo sapiens
gaaaatgcaccctaagcatcaacctttaccagagagtccaggctatacttatcagcacatctcgagagacttaagtgcaacagtgccaagccctccacctrtgactgtatctatgaaaccagaaggacagtggcctgaacattttaaatcaactgctacattgacactaagagttactgaatttccaggttttgtttcctt

SEQ ID NO: 24409 - DNA, 201 bp, Homo sapiens
agagagtgttgaagaaaaaaaaaaacaaaaaacctctcaactgagactactatacccattaaagtgtctcttcaaacacaaaggagagataaagactttcyccaaataacaaaagatgaaggaattcataaacaccaaacctgtccaaaaaaatgctacagggagtccttccatctggaagaaatggaccctaaggtgtaa

SEQ ID NO: 24410 - DNA, 201 bp, Homo sapiens
tgtgatttccagagttaacacataataattattaagatgtccagttccactttttaacaaaaattatggaatatgcaaaaaaaaatgcttgttcacagaakaaactaacagaagctctattttttcacgtcagatgggtaatgtgccaatgtcataaaaaggcttgagggaggcatattttattcatgagcataaaaagcc

SEQ ID NO: 24411 - DNA, 201 bp, Homo sapiens
gctgacctctaaatgcagtacaagcaggaagtaaaggctaaggtggttgtaaatggcctggctaagcattgaaggagtgccttagcacagagtcgatctgwaaagatgaagttctctctgtcctcctccctctgtcttctgttgtgtaaggaaatcatgtcaaaacaataactgaacacaagttaaaggagcagagatttt

SEQ ID NO: 24412 - DNA, 201 bp, Homo sapiens
tggtgtatacttgcataggacatttttgatggaaggtgaaacccatagggtcataataaagtaaatttaaatttagatggtctttctttggcttactcctragatgtttgtttgtttcctatgggggatctacaaactaaaggaagagtttaattacacagggcatttgaattatacatcaaagtgatgctaaggaaaaag

SEQ ID NO: 24413 - DNA, 201 bp, Homo sapiens
gacaaaactaaaatagccaagccctaacaaagctcaaaccaatccttgataatggtgttttctgcctaatcaaggaaaacctaacacgttgagagaaagakagagagagaaagagagagggcgtattatccagacttcttaaaatagttcatcctcgaagtccaacattaaatttaaaaaattacaacacattctaaaaaa

SEQ ID NO: 24414 - DNA, 201 bp, Homo sapiens
tgttagtttgttctttcattactacaaagaaaaacccaagactgagtaatgtgtagagaaaagaggtttaattggtttacagttctgaaggctatacaagygtagttatggcattcccttggcttttggggaggcctcagtgagcttttactcatggcagaaggcaaaacaagagcaggtatatcacaccactgcaaaagc

SEQ ID NO: 24415 - DNA, 201 bp, Homo sapiens
tcccaaaacctcaaaagtagggaagccgactgtgtagctttcagtctatggctaaaggcccgagagcccctggcaaaccactgatgtaggtccaagagccyaaaagccgaagaacttggagtctgatattctatgggaggggctgccacaatggtctctgaaatgtctttgaggccttgttcctcttggctatttgtattt

SEQ ID NO: 24416 - DNA, 201 bp, Homo sapiens
aagaaatacctgagactggataatttatagggaagaaagacttaattggctcacagttctgcagaccttacaagaagtatggtgctggtatttgctgctgrtgagggcctcagggagcttttactcatggtatacagcaaagtgggagcttgaacatcacatgatgagagcgggagcaagagagagagtggtgtgcggtac

SEQ ID NO: 24417 - DNA, 201 bp, Homo sapiens
cttggctcatgcctgagggtgtttgtggtgtgggagaatggattacaagtagaatgtggtggttttagtggattgaggagctagtagtcagacttcagagmagccaatatacttgggacttgagggagaaaatcttggcgaggagagaattgaaggaaggtgaatcaaaaaatctgcatacaagctgggcacagtggagtg

SEQ ID NO: 24418 - DNA, 201 bp, Homo sapiens
agaaacaataagcagtagaaacatatccacaggattatttggtattagaattattgggcacattttttaataacctggtgacttctgggttttttccattrctaagtagtttgtaatggactaaccttaccaaaatcaactattaaagctgccaaaaatatataaagtagctattgaaggaactggacagtaaccaatgtg

SEQ ID NO: 24419 - DNA, 201 bp, Homo sapiens
cagtgagctgagattgtgccactgcactccagcctgggcaacagagcaagaccttgtctcaaaaacaaaaacaaaacaacaacaacaaaaaacaaaaaaamcccacagaaatccaaatccactgttagtctgatggggtttctttattggtgaccagatgcttttctcttgctttttaaagggtatgctttttatctttga

SEQ ID NO: 24420 - DNA, 201 bp, Homo sapiens
tataagtaaatgcaaaattaccctgtgataagtgctatgaagtaaagatgagccacttttataactataactttatctaatgcttaatcctctatttctgtgtatggtttctattccctccttattataagcaatacaattagcatattttctcattttccccttctcagtttcctcttccatctgattttagttgattgc

SEQ ID NO: 24421 - DNA, 201 bp, Homo sapiens
tgcccctcccggcgcccgcctcgcctcgcctgtcccgcgcccgcctcgcctgtcccgcccccgcgcctgcgcgtcaagtggctgggctggcttagcggacyccggttgctagggtgtgtctccttggcctcctagagggtggggatccgtggtgcttcttcgggaacagcctcctgcaggaagaccctcgctggaccttta

SEQ ID NO: 24422 - DNA, 201 bp, Homo sapiens
catgttatgcttagaactttattactatgaaaagctctttgatttgtcttttcaactctcttataaaatgaagataataaatcacttcaaaaatccaaatgtttttttttcctgttcccaaagcttttgtagaaaagataaaaaagggagaaaaagggaggtggggtgaaggacagagacatgttttagactcatgccctg

SEQ ID NO: 24423 - DNA, 201 bp, Homo sapiens
gtatatttaggatggttagctcttcttgttgcattggtccctttacccattatgtaatgccctcctttgtctcttttgacctttgttggtttaaagtctgytttatcagagactgggattgcaacccctgctttttttttttgctttccatttgcttggtaaatattcctccatccctttattttgagcctatgtgtgtct

SEQ ID NO: 24424 - DNA, 201 bp, Homo sapiens
attcctccatccctttattttgagcctatgtgtgtctttgcacgtgagatgggtctcctgaatacagcacattgatgggttttaactctttatccagtttsccagtctgtctgttttaataggggcatttagcctatttccatttaaggttaatatcgttatatgtgaatttgatcctgttattatgatgctagctggtta

SEQ ID NO: 24425 - DNA, 201 bp, Homo sapiens
aaagggagaaaaagggaggtggggtgaaggacagagacatgttttagactcatgccctgaggttatgcagaaacaactgtcacaaaggttaaaacaaaaartctttatctttttctcagtggatagcaggagaaaaatgacacaggaaatagctacttcaactgagggagtcaaatctttgccttacttgtttgactcaat

SEQ ID NO: 24426 - DNA, 201 bp, Homo sapiens
gcacgtgagatgggtctcctgaatacagcacattgatgggttttaactctttatccagtttgccagtctgtctgttttaataggggcatttagcctatttmcatttaaggttaatatcgttatatgtgaatttgatcctgttattatgatgctagctggttattttgccctttagttgatgcagtttcttcatagtgttga

SEQ ID NO: 24427 - DNA, 201 bp, Homo sapiens
ccttacttgtttgactcaatttactttaattggcaggtaggttcttcgggaaagagaaactatttggaacaaaaagaaccgaacagcctatttgaaagccstgtcttaacagcagatctgaaattgtacacatttattttcccatattgttatttattaaagaaggggattaaattaccttgcctccacatatctgatgaa

SEQ ID NO: 24428 - DNA, 201 bp, Homo sapiens
aatcatgtcttcatgctttatttcattaagttgatcttcagtctctgatatcctttcttctgctgatcgatttggcttttgatacttgtgtatgcttcacraagttcttgtgctgtgattttcagctccatcagttcatttagcttctctaaactggttattctagttagcaattcatctaacctttttttcaaagttctt

SEQ ID NO: 24429 - DNA, 201 bp, Homo sapiens
tattattatccaccttctgaagcctacttctgtcaatttgtcaaactcattctccatccagttttgtttccttgctggcatggagttgtgatcctttggasgagaagaggcattctggtttttggaattttcagcctttttgtgctagtttttcctcatcttcgtggatttatctacctttggtctttgatgttggtcacc

SEQ ID NO: 24430 - DNA, 201 bp, Homo sapiens
tgcagacttctgacctatataactataattaataaatctgagttgttgtacgccactgtttgtgttgcaatttgttaatggcagtaacagcaaactaaaayaaaaccagtcaaagatttcaactcttgtgggatcacattcccccaggaggagacagtcaatatatgtaataaataaattatatagtatgtgagaaggtaa

SEQ ID NO: 24431 - DNA, 201 bp, Homo sapiens
atgctattcctttctgtttgttattttttccttccatcagtctggcccctctgctgcaggtctgctggagtttgctgaagggccactccagaccctgtttkcctgggtatcaccagcggagcctgcagaacagcaaagattgttgcctgcttcttccactggaagcttcatcccagaggggcacccaccagatgccagctg

SEQ ID NO: 24432 - DNA, 201 bp, Homo sapiens
tatacaccatagaatactatacagccttaaaaaaggatgagttcgtgtcctttgtagggacatggatgaaattggaaatcatcattctcagtaaactatcrcaaggacaaaaaaccaaacacggcatgttctcactcataggtggtaattgaacaatgagaacacatggacacaggaaggggaacatcacactctggggac

SEQ ID NO: 24433 - DNA, 201 bp, Homo sapiens
agatggtggtagttggaaggagttctggagtctattgaagcgtttgctgtgttaatgtgttttgttttaatagagagaaaatgaacttaaatatattggtrtagctattttattgaatcagttagctttaattagttccacttaagtaggaagcaaacattattttcttactactgcccttcaatctcatgtggcatatgt

SEQ ID NO: 24434 - DNA, 201 bp, Homo sapiens
cagccttaaaaaaggatgagttcgtgtcctttgtagggacatggatgaaattggaaatcatcattctcagtaaactatcacaaggacaaaaaaccaaacayggcatgttctcactcataggtggtaattgaacaatgagaacacatggacacaggaaggggaacatcacactctggggactgttgtggggtggggggaggg

SEQ ID NO: 24435 - DNA, 201 bp, Homo sapiens
catgcataacacacatatgtcttacctcattttcagctccctaagtcatttatggagcagctatttttaatatattgactatgaaccaaatatattgataytgagaatataaaagctgatgcactcgtaatctgggtggggtggacaggcatacagaaatatgaattaactatttgccatgtgccaggcaaatcaaacaaa

SEQ ID NO: 24436 - DNA, 201 bp, Homo sapiens
agccttaaaaaaggatgagttcgtgtcctttgtagggacatggatgaaattggaaatcatcattctcagtaaactatcacaaggacaaaaaaccaaacacsgcatgttctcactcataggtggtaattgaacaatgagaacacatggacacaggaaggggaacatcacactctggggactgttgtggggtggggggagggg

SEQ ID NO: 24437 - DNA, 201 bp, Homo sapiens
tcatggtatacagcaaagtgggagcttgaacatcacatgatgagagcgggagcaagagagagagtggtgtgcggtacaggtgccacaaactttaaaacagycagatcttataagaactcactatcatgagggcagcacaaagccatgagggatctactcccatgaaccagacacctcccaccaggccccatgtccaacact

SEQ ID NO: 24438 - DNA, 201 bp, Homo sapiens
taaactatcacaaggacaaaaaaccaaacacggcatgttctcactcataggtggtaattgaacaatgagaacacatggacacaggaaggggaacatcacaytctggggactgttgtggggtggggggaggggggaaggatagcattaggagatatacctaatgctaaatgacgagttaatgggtgcagcacaccagcatgg

SEQ ID NO: 24439 - DNA, 201 bp, Homo sapiens
aatacacagtcattcaaaggtgatctagaagaactccagaagtagaatgccagtgctgatagatgccttcatgaatatattttcatggataattggaatcyattaaatgatgaacaattatattgaagtcataaaaccctcaagtgaatttttacaaatatccaaagtcatcccatttgtttttcatttttctagaaactc

SEQ ID NO: 24440 - DNA, 201 bp, Homo sapiens
caaaggatcggaaaagctaatataaagaagcagtgagaatacacagtcattcaaaggtgatctagaagaactccagaagtagaatgccagtgctgatagaygccttcatgaatatattttcatggataattggaatccattaaatgatgaacaattatattgaagtcataaaaccctcaagtgaatttttacaaatatcca

SEQ ID NO: 24441 - DNA, 201 bp, Homo sapiens
acaagggaattcaaaggatcggaaaagctaatataaagaagcagtgagaatacacagtcattcaaaggtgatctagaagaactccagaagtagaatgccartgctgatagatgccttcatgaatatattttcatggataattggaatccattaaatgatgaacaattatattgaagtcataaaaccctcaagtgaattttt

SEQ ID NO: 24442 - DNA, 201 bp, Homo sapiens
taaatacaatctgaacacggtataattatagagtcaagtagagcaaaggggagagaaggcatgcaagctaatggtacccctcccgctttgggtttgcagartgggaggatggaatcaccttttatatatacatgtaatacttgagccatagggcaataacagaagtcctgaccttgcagatctgccaaggccagactgggt

SEQ ID NO: 24443 - DNA, 201 bp, Homo sapiens
ttatgtaacaattgattgtttcaatatagggcaaattagaagttaataaagaaaaaagttctatttgagtaaagcacacatttcctgaggcctacattttygttcctaaggttttgctttgagcaacttagggcatactgtgtgaggcagcatggaggcaggaaagctcagcttctgtgggagaaagaacaggggcctcct

SEQ ID NO: 24444 - DNA, 201 bp, Homo sapiens
tgctactggttccatattttttccacattgtaattcagcttctactcgaatttttgggaaacaaacaaacaaaatggaaagttcaagaaagtttaaaactrtgaaagatgtttatactgaaaaaaggctagaaaacattttaattctttcttccaagttttccaaacctaaaagtactcctggctcagttatcgctcaaaa

SEQ ID NO: 24445 - DNA, 201 bp, Homo sapiens
tgagagaacagaaaaatgtcatttcacattctgttgcataggaaagaaaaggcatatatgattcctgcctaagaatgcaagctcagtggattttctggacrtaagatagaaaagaatacttattgttataacctaaatgagcttatggcacctgtaaccactatcagattgttatcatcttcaaaagacacattggtctga

SEQ ID NO: 24446 - DNA, 201 bp, Homo sapiens
tcagcatcccaaagtgctgggattacaggcatgagctactgtgcctggccctactctctttctcaactcatattatagtttttggttcctctataagtggrgcaaggtgtggggaagagttaagttgttaaaaagttaaaaattaaagtgagaatcagcatcagtcttgtaccccatggaaatgtcaggagatacaagtca

SEQ ID NO: 24447 - DNA, 201 bp, Homo sapiens
atgcaatatttttgaaattatgtaacaattgattgtttcaatatagggcaaattagaagttaataaagaaaaaagttctatttgagtaaagcacacatttmctgaggcctacatttttgttcctaaggttttgctttgagcaacttagggcatactgtgtgaggcagcatggaggcaggaaagctcagcttctgtgggaga

SEQ ID NO: 24448 - DNA, 201 bp, Homo sapiens
gttgtagtcactacttagagcctcagtcaagcaggtctctggatcacctgccccaggcttcagcagcagtagcagaagtgggtgtgtggaggaggaggagrtgtcctgttctctatgtgtgagcctgagaacagagactcttccgccggtgggagaggaaatcaaactaatgagtataaattactccagtttgccattaaa

SEQ ID NO: 24449 - DNA, 201 bp, Homo sapiens
gagaattcttgttttcctttggaagtttcatatttccttgtattttgatgttttctgtgtctttatattgatatctgtgtatctggtgtaacagttgcatmttcctattttttaattcacttccatagggtaggacttttttctgaagatgtatctgtggtgttggttgggtagggcactttggctttgattctgagtaca

SEQ ID NO: 24450 - DNA, 201 bp, Homo sapiens
aataaaaccagtcaaagatttcaactcttgtgggatcacattcccccaggaggagacagtcaatatatgtaataaataaattatatagtatgtgagaaggyaataagtgatatgaaaaagaacaaacagtaaaagggagtgagagtgtgattttaagtgggatagctaaggtaggccttattgagaaagggacactggaac

SEQ ID NO: 24451 - DNA, 201 bp, Homo sapiens
cacaataaaaaaaatagagattgtcaaactggctaatgaagaaccactcaattatttgctatttactaggaagcgtacttaaataaagatactgatggttraaaagtaaaactggaaaaagataacagtaggcattataaagctcttatggctgtattagctgactaggtagaaaataatactaaagataaagaatattac

SEQ ID NO: 24452 - DNA, 201 bp, Homo sapiens
gatgttcatgaagcatctattaatactgtgtgctcctaggagctcaccacctaaaaggaaggcagacaattcaatacaattgagtaaagtaaaataatggwgatgtacacagtaaaatgtatgagttacatgtaacccattctgaagggtgagagttggttccctggaagatgtagtatttgatccaaaggtgactgagtg

SEQ ID NO: 24453 - DNA, 201 bp, Homo sapiens
gaatgctgatatttggacataaaagagatgggtttcttcccacgtatggactagtaattatttaactcctaatgaaaattttaaaccaaaaccttaaccamatgtcaaaacaagatacttattccaatcagagtttaacaaattgaatctctcagtacaaagagaaagggactcataaatagttgaataatactttgcaaa

SEQ ID NO: 24454 - DNA, 201 bp, Homo sapiens
cagttcaggtgagagccttgcacctatctcttgacagcctttttggatatggaaagagcactgaatttgggatgaggaaatctagtcctttgactttaaarttgatgataattatatatttgatctggagaaagtaatttaaccattcttggcctcaatttcctaatctgtaaactaaggagattggcttatatgatatct

SEQ ID NO: 24455 - DNA, 201 bp, Homo sapiens
tactttcccacagaagtgagtcaacttttattgttatgtactgatataacttgtcgtgaataataattataataaaaatagacgtcttttaataccttgargttactataaagtactgtaaatgtattttggattgcatcttttgaatggcttattttcagaagcacaaaatgtacagtacatctttcttaggaaatccca

SEQ ID NO: 24456 - DNA, 201 bp, Homo sapiens
ccttagcagagctcaagtgctgtgctgggagctccgctgctctcttcagagctggcagacaggaacatttaagtctgctgaagctgcacccatggccgccycttcccccaggtgctctgtaccagggagaaaggagttttctctataagcccctgactggggctgctgcctttctttcagagatgccctgcccagagagga

SEQ ID NO: 24457 - DNA, 201 bp, Homo sapiens
ttaaatatttattcttctaactctgaatgtaatctaaaataaaccttatttatgtgccaatcagaagctttaaaaacaaagtaaacatgcagtgttgtaayaagttttaattaccaaacgataaaatataatattctgcttaataaaatgtatgaaggataatcagatatgagatgagctaatttaatgtcatttcaagtg

SEQ ID NO: 24458 - DNA, 201 bp, Homo sapiens
agaatgatacatccaacaactgcagaataaacattactttttaggtacacatagaacaatttcaagatagaacatttgttgggccataaaacctgtctcargaaattttaaaagattgaaatattgtagttctcgtaccacaacagaaataaaatagtcacagtaagatatctagaaaagtaccaaatatttgtgctaaat

SEQ ID NO: 24459 - DNA, 201 bp, Homo sapiens
ctcagccatttcagcaaagtcaaaaatagaaatgggattaactaggaacgaaatttgtggacaagtcttttgtcttatggaatgaatacccatgatatacwtgggaaacccactaggttcttgaagattttatactaatagaaatgttgccagagtgtattaagaaggacaaagacagtatgaaatgaaaaaaggctgtca

SEQ ID NO: 24460 - DNA, 201 bp, Homo sapiens
caagatagaacatttgttgggccataaaacctgtctcaagaaattttaaaagattgaaatattgtagttctcgtaccacaacagaaataaaatagtcacartaagatatctagaaaagtaccaaatatttgtgctaaatattaatttaaatattaaaaagcactaagtgtttggaaatcaaacaacacactaattaaaaaa

SEQ ID NO: 24461 - DNA, 201 bp, Homo sapiens
atactgatggttaaaaagtaaaactggaaaaagataacagtaggcattataaagctcttatggctgtattagctgactaggtagaaaataatactaaagawaaagaatattaccaagtatagagaaaagtttgaaaatgtttaaagggtcaattcatcaagaacacagaacaatctaaatgtgtatagatataattagaat

SEQ ID NO: 24462 - DNA, 201 bp, Homo sapiens
ccattgtattttgagagcagataacttgtttctttaatttcatagatccacaaatggagaaaagttgtgcttctggatgggttatatctggagcctcaccyatacctaatttagatgatgagatatgggacttttgagatttagatgagatgttgaactttgagttgatgctgtaaaggttaacctttcgggaaattgaga

SEQ ID NO: 24463 - DNA, 201 bp, Homo sapiens
cataaaccaaaatttgacagaactaaagtgagaagtagaacaattcaccatcataactagagattagacttaatatatcttgatcaagaattgatatgtgyagtcaaaaacaattcaataaagatatagaagatctgaaataactccagcgactaacttgacctaattaacatttatagaatgatacatccaacaactgca

SEQ ID NO: 24464 - DNA, 201 bp, Homo sapiens
taatactaaagataaagaatattaccaagtatagagaaaagtttgaaaatgtttaaagggtcaattcatcaagaacacagaacaatctaaatgtgtatagwtataattagaatgcctcaaaattcataaaccaaaatttgacagaactaaagtgagaagtagaacaattcaccatcataactagagattagacttaatata

SEQ ID NO: 24465 - DNA, 201 bp, Homo sapiens
gcatgtgggatagatgtgaatctttagggatgaactgtgatagggcgaataatggtccccaaagatgttcatattctaccagaacatgtgaatatgttatmttacatggcaaagggaaattaagtttggagatgaaattaagggttctaatcagctgatcttaaagtagggagattattctggattagttgagtggtccca

SEQ ID NO: 24466 - DNA, 201 bp, Homo sapiens
aaaccaagaggacgggctggtctcaaactcctgacctcaggtgatccgcctacctcggcctcccaaagtgctgggataacaggcatgagccactgcacccrgcccttggttataagctttaaagaatttgtttgctattttgcacatttctgccttaagactgtgtttctagcaactatttaaacttataaactcttcatt

SEQ ID NO: 24467 - DNA, 201 bp, Homo sapiens
tcacctcattctcttttagcctgtgaaatttctgctaagaaatccactgttaaggccaggcacagtggctcacgcctgtaatcccagtactttgggaggcygaggtgggtggatcacaaggtcaggagttcgagaccacctgggccaacatggtgaaaccccgtctctactaaaaaaatacaaaaattagctgggcatggt

SEQ ID NO: 24468 - DNA, 201 bp, Homo sapiens
ttgaacatgggaggtggaggttgcagtgagctgagattgtgccactgcactccagcctgggcaacagagcaagaccttgtctcaaaaacaaaaacaaaacaacaacaacaaaaaacaaaaaaaacccacagaaatccaaatccactgttagtctgatggggtttctttattggtgaccagatgcttttctcttgcttttta

SEQ ID NO: 24469 - DNA, 201 bp, Homo sapiens
ctgctaattcttacacaagccaagggaaggaggggcctgatcagttcttcaaccctatttttttactctctttttctattcttttcatttttcctttttcttttttttttgacagggtctcactccgtcacccaagttgaagtgcagtggtacaatcatggctcactgcagcctcaatctcctgggctcatggtaccctcc

SEQ ID NO: 24470 - DNA, 201 bp, Homo sapiens
tttcaccgtgttagctaggatggtcttgatctcctgacctcgtgatccgccggcctcggcctcccaaagtgctgggattacaggcgtgagccactgcgccyggcctgccacacacttttaaacaacatcggaattccactcactaccacaaggacagcaccaagccataggagatctgcccccatgacccaaacacctccc

SEQ ID NO: 24471 - DNA, 201 bp, Homo sapiens
tctattatagggacacatgcgtatgcttattgcagcactatttgtgataacaaagtcatggaatcaacctaaatgcacatcgatgatagactggataaagraaatgtggtacatatacaccatagaatactatgccgccattaaaaagaacatgagcatgtcttttgtgggaacatggatggagctggaggccattatact

SEQ ID NO: 24472 - DNA, 201 bp, Homo sapiens
ggggctcctccctaactgattcagtgatggcagcatcatcctgataccaaaacctggcagagacacaacagcagcaacaacaacaacaacaaaactttagrccaatattcttgatgaacactgatgcaaaaatcttcaacaaaatactggcaaactgaatccagcagcacatcaaaaagtttatctaccatgatcaagtag

SEQ ID NO: 24473 - DNA, 201 bp, Homo sapiens
caagtcaaggataccctctatctctctctctttttctttttttttttttttttttgacggagtctcgctctgttgcccaggctggagtgcagtggcacgaycttggctcactgcaagctctgtctcccaggttcacgtcattctcctgcctcagcctcctgagtagctgggactacaggcgcctgccaccacgcttggcta

SEQ ID NO: 24474 - DNA, 201 bp, Homo sapiens
ttggctcactgcaagctctgtctcccaggttcacgtcattctcctgcctcagcctcctgagtagctgggactacaggcgcctgccaccacgcttggctaatttttttgtatttttagtagagacagggtttcactgtgttagccaggatggtctctatctcctaacctcatgatccgcccacctcggcctcccaaagtgct

SEQ ID NO: 24475 - DNA, 201 bp, Homo sapiens
gcaacagagcaagaccttgtctcaaaaacaaaaacaaaacaacaacaacaaaaaacaaaaaaaacccacagaaatccaaatccactgttagtctgatgggrtttctttattggtgaccagatgcttttctcttgctttttaaagggtatgctttttatctttgactttaggcagtctcactataatgtgccatggggaaga

SEQ ID NO: 24476 - DNA, 201 bp, Homo sapiens
aaactatgcatctgacaaaggcctaatatccggcatttataaggaacttaaacaaatttacaaaagaaaaacaaacaaccccattaaaaagtgggcaaagrccatgaaaagacactccaaaagaagacatacatgtgatcaacaagcatgaaaaaagctcaatgtcactgatcattagagaaatgcaaatcaaaatcacaa

SEQ ID NO: 24477 - DNA, 201 bp, Homo sapiens
ctgttattttttatctttttaataacagccattctgactagggtaagataatatctcattgtggtttaatttgtatttctctaatgattagtgatattgarcatttttaaatataagtgttggccatttgtatgtcttcttttcagaaatgtctattcatgtcatgcctaaggggattttttgttttctaaggggattttt

SEQ ID NO: 24478 - DNA, 201 bp, Homo sapiens
catctgttattttttatctttttaataacagccattctgactagggtaagataatatctcattgtggtttaatttgtatttctctaatgattagtgatatwgagcatttttaaatataagtgttggccatttgtatgtcttcttttcagaaatgtctattcatgtcatgcctaaggggattttttgttttctaaggggatt

SEQ ID NO: 24479 - DNA, 201 bp, Homo sapiens
aagtgatgctaaggaaaaagtgaggctgatgtcttcatgaggtattcttacatgatgttgcttattaattttatgagccaagaagttctttatgtaattcrtagtaaattttaagagaacatttttacacatagtatacaaagactgatattgatggaatctaaattatctagacagaaatctatgagcatatggtttact

SEQ ID NO: 24480 - DNA, 201 bp, Homo sapiens
agggttgggagctcccggaccccttatgcttcccaggtgaggtgatgccgtaccctgctttggctcgccctccatattgggaagatttctttaagcatcgyttctctacccaatcagactgcctttttcttttctcccatagtattccatacttactcctacgcaccacttattataactgtttacctgcctagtttctat

SEQ ID NO: 24481 - DNA, 201 bp, Homo sapiens
ggagggccatcgtataaaaaccaagaggacgggctggtctcaaactcctgacctcaggtgatccgcctacctcggcctcccaaagtgctgggataacaggcatgagccactgcacccggcccttggttataagctttaaagaatttgtttgctattttgcacatttctgccttaagactgtgtttctagcaactatttaaa

SEQ ID NO: 24482 - DNA, 201 bp, Homo sapiens
aattatttttgctttaaatttcccaatatagattagtttccatggtattgaggggaattttcctattacaatagagatttcttaggaacacattcaaattrcatctctaaacctatattcctagtttgccttcagtttaaaaagattctgaggttcaagtcaatcacagtgctttttttattacttagcataagagaattt

SEQ ID NO: 24483 - DNA, 201 bp, Homo sapiens
ttggagtgcaccattcctcacggcacagtccctcaaggcttctcctggctagggttgggagctcccggaccccttatgcttcccaggtgaggtgatgccgyaccctgctttggctcgccctccatattgggaagatttctttaagcatcgtttctctacccaatcagactgcctttttcttttctcccatagtattccata

SEQ ID NO: 24484 - DNA, 201 bp, Homo sapiens
gagacatataatctaattgtcaaaagccaaagtcaaagaaagaatcttgacagcagcaatcaagaagtgttttgtcatgtacaagggctctacaatgaaawtcacagccagtttgttgccagaaactatggaggcaagaaaggaatgggatgacatctttatagtgctgaaagaaaagcaatctgtcaaccaaaagtctat

SEQ ID NO: 24485 - DNA, 201 bp, Homo sapiens
ttgggttggagtgcaccattcctcacggcacagtccctcaaggcttctcctggctagggttgggagctcccggaccccttatgcttcccaggtgaggtgaygccgtaccctgctttggctcgccctccatattgggaagatttctttaagcatcgtttctctacccaatcagactgcctttttcttttctcccatagtatt

SEQ ID NO: 24486 - DNA, 201 bp, Homo sapiens
gtaaaggcagtaaaagtatctgtggttttcagggttgtggcagaagggaagaaaggatgaataagagaagcacaggtgatttttagggcagtgattctgtrtgatactgtaatggtgaatctatttccttatgcattttgaaaacccatagaatatataacacaaggtgtgaactataatgtaaactatggacttgggttg

SEQ ID NO: 24487 - DNA, 201 bp, Homo sapiens
ttaagttccttgtaaattgtggatattaaacctttttcagatgggtagattgcagaagttttctcccattctgtaggctgcctgttcactctgatgacagyttcttttgctgtgcaaaagctctttagtttaactagatcccattttgtcagttttggctttggttgccactgcttttggcgtttttgtcatgaagtcttt

SEQ ID NO: 24488 - DNA, 201 bp, Homo sapiens
gcagagataaatgaaatagagaatagaaaaacagtagagaaaattaatggaaacaaagataggttatttgtaaagatcaacaaaataaacaaatcattagmtagactaagtaaaagagagagaatgtacaaataactaacattagtcatgaaaattgaaatattacaactggccttacaaaaatgaaggggattgtaagag

SEQ ID NO: 24489 - DNA, 201 bp, Homo sapiens
ttgcagttttagtgtcaacatttatactgttcaaatatacctagtctataacttgatttataatgttaaattatcatcttttgacctatggctattaacartaggtaactcaacttacctgtaatactgccacaatttcctctcctactttctctcccaacttttgttacatgatttttacatcatcatttctacatttct

SEQ ID NO: 24490 - DNA, 201 bp, Homo sapiens
aggagcagccagattcataaagcaaattattagattcctacaaaaagactgagactccctcacaatgaatagtgggagacatcaacactccactgacagcrttagacagatcatcaaggcagaaaattaacaaagatattcaacattggacaaaaatggatctggacctttacagaactctacccctaaaacaacagcatt

SEQ ID NO: 24491 - DNA, 201 bp, Homo sapiens
gcaaattattagattcctacaaaaagactgagactccctcacaatgaatagtgggagacatcaacactccactgacagcgttagacagatcatcaaggcakaaaattaacaaagatattcaacattggacaaaaatggatctggacctttacagaactctacccctaaaacaacagcattcttcccatttccacatgacac

SEQ ID NO: 24492 - DNA, 201 bp, Homo sapiens
tatttgaaaaaataatggccaaaatattccaatttgattaaaagcacaaatctatacatccaggaagctcaatcaactccaagaaggataattgccaagaratccacaatgagacatataatctaattgtcaaaagccaaagtcaaagaaagaatcttgacagcagcaatcaagaagtgttttgtcatgtacaagggctct

SEQ ID NO: 24493 - DNA, 201 bp, Homo sapiens
catgtaatcgaacacaaaacaagtctcagcaaatgcaaagtaattgtattagtacattgtcatactgctatgaagaaatacctgagactgggtaatttatwaaaaaaaaagaggtttaatggactgacagttccacatggctggggaggtctcacaatcatggcagaaggcaaaggagaagcaaagacatgtcttacatga

SEQ ID NO: 24494 - DNA, 201 bp, Homo sapiens
tttgtaagcctcatggtaacctcaaagcataaacctgtaatagcacagaatcaaaacacattactagagaaaattacttaaacacaaaggtagtaagggargtaaaaaggaagaaagtattcacacaataagcagaaaatgaataacaaaatgacaataggaaacccttacctatcaataaaaaccttgaatataagtaaa

SEQ ID NO: 24495 - DNA, 201 bp, Homo sapiens
cactatttgtgataacaaagtcatggaatcaacctaaatgcacatcgatgatagactggataaagaaaatgtggtacatatacaccatagaatactatgcygccattaaaaagaacatgagcatgtcttttgtgggaacatggatggagctggaggccattatacttagcaaactaactcagggacagaaaaccaaatatt

SEQ ID NO: 24496 - DNA, 201 bp, Homo sapiens
tatggaaggatgtaagttgaaacatcaagaagtcaaaatatgtagaaggtgctattaaagtgtggagtttgtttttgatgcttttccttgtgagcaaagtyaagttgtcatcagtttaaaattgcctattataacatgttttttgtaagcctcatggtaacctcaaagcataaacctgtaatagcacagaatcaaaacaca

SEQ ID NO: 24497 - DNA, 201 bp, Homo sapiens
cttccatctggaagaaatggaccctaaggtgtaacaagaaaacatttcaaaatataaaactcactgcttcaagtaagaaaattgaaaactagacaaattcrgaatatattaatactgtaattgtggtaagtaaaccacttacatcttaaatatgaagactaaaagacaaaactattaaaaacaacaattgcaacagctggt

SEQ ID NO: 24498 - DNA, 201 bp, Homo sapiens
actcaagtacaggaaattcaaaggtcaccaattagattaaatgcaggaggaatttcccaaggtacatcataatcaaattagcaaaaatcaaagagaaagamtatttgaagcacaaagaataaagaaacatgtgacgttcaacagagccccagtacagctttcagcagattattcagcagaaaccctgcaggctaggagaga

SEQ ID NO: 24499 - DNA, 201 bp, Homo sapiens
aaaataatggagatgtacacagtaaaatgtatgagttacatgtaacccattctgaagggtgagagttggttccctggaagatgtagtatttgatccaaagktgactgagtgtgaattaggtggattaaacaggagagacaacaaaggatagttgggccaatgatagggtggatatttcttcaatgaaaagttacaacgtat

SEQ ID NO: 24500 - DNA, 201 bp, Homo sapiens
ccccatggaaatgtcaggagatacaagtcaagtagttaaaatgattctcttatattactctgatcaggaaacagcactagtaaaccaatacattttgctgytctacaagtatcagtcagggaggtggataggggaagagtgagatgttactttctccttgtggcatatattcctcttctctataaaaagtctccctcactt

SEQ ID NO: 24501 - DNA, 201 bp, Homo sapiens
tcaacactcctattcaacaaagtattggaaatcctggccagggtaatcaggcatgagaaagaaagaaagaacatccaaataggaagagaggaagctaaacyatccctatttgcaaatggcatgatcccatgtctagaaaacctcgtagtctcagcccaaaagctccttaagctgataaacaacttcagcaaagtctcaggc

SEQ ID NO: 24502 - DNA, 201 bp, Homo sapiens
aaatgaagataataaatcacttcaaaaatccaaatgtttttttttcctgttcccaaagcttttgtagaaaagataaaaaagggagaaaaagggaggtgggrtgaaggacagagacatgttttagactcatgccctgaggttatgcagaaacaactgtcacaaaggttaaaacaaaaagtctttatctttttctcagtggat

SEQ ID NO: 24503 - DNA, 201 bp, Homo sapiens
ggacaaaaatggatctggacctttacagaactctacccctaaaacaacagcattcttcccatttccacatgacacatactctaaaatcaaccatgtaatcraacacaaaacaagtctcagcaaatgcaaagtaattgtattagtacattgtcatactgctatgaagaaatacctgagactgggtaatttataaaaaaaaaa

SEQ ID NO: 24504 - DNA, 201 bp, Homo sapiens
agaaaacaataatgataagagcagagataaatgaaatagagaatagaaaaacagtagagaaaattaatggaaacaaagataggttatttgtaaagatcaayaaaataaacaaatcattagctagactaagtaaaagagagagaatgtacaaataactaacattagtcatgaaaattgaaatattacaactggccttacaaa

SEQ ID NO: 24505 - DNA, 201 bp, Homo sapiens
tctctctctttttctttttttttttttttttttgacggagtctcgctctgttgcccaggctggagtgcagtggcacgatcttggctcactgcaagctctgyctcccaggttcacgtcattctcctgcctcagcctcctgagtagctgggactacaggcgcctgccaccacgcttggctaatttttttgtatttttagtaga

SEQ ID NO: 24506 - DNA, 201 bp, Homo sapiens
cttttaataaaattcaacatcactacatgttaaacactctccataaactaggtattgaaggaacatacctcaaaataataagagccacctatgacagaccmacagccaacaacatactgaatgggcaaaaattggaagcattccccttaaaaactggaacaagtcaaggataccctctatctctctctctttttctttttt

SEQ ID NO: 24507 - DNA, 201 bp, Homo sapiens
cacaaagaataaagaaacatgtgacgttcaacagagccccagtacagctttcagcagattattcagcagaaaccctgcaggctaggagagagtgttgaagaaaaaaaaaaacaaaaaacctctcaactgagactactatacccattaaagtgtctcttcaaacacaaaggagagataaagactttccccaaataacaaaag

SEQ ID NO: 24508 - DNA, 201 bp, Homo sapiens
aagaaacatgtgacgttcaacagagccccagtacagctttcagcagattattcagcagaaaccctgcaggctaggagagagtgttgaagaaaaaaaaaaamaaaaaacctctcaactgagactactatacccattaaagtgtctcttcaaacacaaaggagagataaagactttccccaaataacaaaagatgaaggaatt

SEQ ID NO: 24509 - DNA, 201 bp, Homo sapiens
aagcccagtgctacacagattcacagctgaattctgccagatgtacaaagaagagcttgtactatttctgctgaaactattccaaaaaaattgaggaggargggctcctccctaactgattcagtgatggcagcatcatcctgataccaaaacctggcagagacacaacagcagcaacaacaacaacaacaaaactttaga

SEQ ID NO: 24510 - DNA, 201 bp, Homo sapiens
aatcaaatcacatgagctcttaaaaatggaagggggatgcagaagcatttgtcagagagataccacctgaggacttgacttgcttttgttggttttgaagwtggaggaagggagccatgagtcaaggaatgaggcagcttgaaaacctgggaatggccttcagcatacagccaacaagaaaacaagggcctcagttctaca

SEQ ID NO: 24511 - DNA, 201 bp, Homo sapiens
aatatatgtaataaataaattatatagtatgtgagaaggtaataagtgatatgaaaaagaacaaacagtaaaagggagtgagagtgtgattttaagtgggrtagctaaggtaggccttattgagaaagggacactggaacaaagtgggggtttgtgatgtaaatttagcagttcaagtctaatttaacagtattttattaa

SEQ ID NO: 24512 - DNA, 201 bp, Homo sapiens
ttttttgtaagcctcatggtaacctcaaagcataaacctgtaatagcacagaatcaaaacacattactagagaaaattacttaaacacaaaggtagtaagrgaggtaaaaaggaagaaagtattcacacaataagcagaaaatgaataacaaaatgacaataggaaacccttacctatcaataaaaaccttgaatataagt

SEQ ID NO: 24513 - DNA, 201 bp, Homo sapiens
ctctgcctcctaggttcgagcaattctcctgcttcagcctcccaagtagctgggattacaggcatgcgccaccatgcctggctaattttttgtatttttaktagagacggggtttcaccatattggccaggctggtcttgaactcctgaccttgtgatctgcccacctcggcctcccaaagtgctgggattacaggcgtga

SEQ ID NO: 24514 - DNA, 201 bp, Homo sapiens
taggtaagaaaatcttgtaaattggctgggcatggtggctcacgcctgtaatcccagcactttgggaggccggggtgggcgaatcacgaggtcaggagatygagaccatcctggccaacatggtgaaaccccatctctactaaaaatacaaaaattagctgggcatggtggcgtgtgcctgtaatcccagctactcaggag

SEQ ID NO: 24515 - DNA, 201 bp, Homo sapiens
tggctgggcatggtggctcacgcctgtaatcccagcactttgggaggccggggtgggcgaatcacgaggtcaggagattgagaccatcctggccaacatgrtgaaaccccatctctactaaaaatacaaaaattagctgggcatggtggcgtgtgcctgtaatcccagctactcaggaggctgaggcaggagaatcgcttg

SEQ ID NO: 24516 - DNA, 201 bp, Homo sapiens
ctcgcattgcaaaatacaatcatcccctgccaatagttccccaaaagtctcaactgatttcagcatcattcaaaagtgcaaagtctcacgtgagacaaggmatgtccctttgtattagtttgggttctctagagggacagaactaataggatatatgtatatatgaaagggagtttattaaggagaattgactcaccatca

SEQ ID NO: 24517 - DNA, 201 bp, Homo sapiens
gcttgaacatcacatgatgagagcgggagcaagagagagagtggtgtgcggtacaggtgccacaaactttaaaacagccagatcttataagaactcactaycatgagggcagcacaaagccatgagggatctactcccatgaaccagacacctcccaccaggccccatgtccaacactgggagttacatttcaatatgaga

SEQ ID NO: 24518 - DNA, 201 bp, Homo sapiens
tgaggcaggagaatcgcttgaaccaggggagttgcaggttgcagtgagccaagatcacaccactgcactccagcctggtgacagagcaagactctgtctcaaaaaaaaaaaaaaaaaaaatcttgtaaattatttttaaaatcctttcaattattttcacagattagtctcttttccttgacctaaatttctaaaataaaa

SEQ ID NO: 24519 - DNA, 201 bp, Homo sapiens
atgaagataataaatcacttcaaaaatccaaatgtttttttttcctgttcccaaagcttttgtagaaaagataaaaaagggagaaaaagggaggtggggtraaggacagagacatgttttagactcatgccctgaggttatgcagaaacaactgtcacaaaggttaaaacaaaaagtctttatctttttctcagtggatag

SEQ ID NO: 24520 - DNA, 201 bp, Homo sapiens
tttagactcatgccctgaggttatgcagaaacaactgtcacaaaggttaaaacaaaaagtctttatctttttctcagtggatagcaggagaaaaatgacayaggaaatagctacttcaactgagggagtcaaatctttgccttacttgtttgactcaatttactttaattggcaggtaggttcttcgggaaagagaaacta

SEQ ID NO: 24521 - DNA, 201 bp, Homo sapiens
tgtttgtagaacagaactactgcaaataacaaggaccgaatatatttagtgagcaaaaacagaccttacctgttcccttcattagttacccactgggatastgattgtaatcaatcaatcatataagtaaatgcaaaattaccctgtgataagtgctatgaagtaaagatgagccacttttataactataactttatctaa

SEQ ID NO: 24522 - DNA, 201 bp, Homo sapiens
ggctggtctcaaactcctgacctcaggtgatccgcctacctcggcctcccaaagtgctgggataacaggcatgagccactgcacccggcccttggttatamgctttaaagaatttgtttgctattttgcacatttctgccttaagactgtgtttctagcaactatttaaacttataaactcttcattgataaagaataaat

SEQ ID NO: 24523 - DNA, 201 bp, Homo sapiens
tgcacctattgacccatcctctaagttttctcccctcaccctccacccactaacaggccctggtgtgtgttgttccccaatctgtgttcatgtgttctcartattcaactcccacttacaagtgagaacacacagtgtttggttttcttttcctgtgttagtttgctgaggatgatggctttcagcttcatccatgtccct

SEQ ID NO: 24524 - DNA, 201 bp, Homo sapiens; identical to SEQ ID NO: 11349

SEQ ID NO: 24525 - DNA, 201 bp, Homo sapiens; identical to SEQ ID NO: 11350

SEQ ID NO: 24526 - DNA, 201 bp, Homo sapiens; identical to SEQ ID NO: 11351

SEQ ID NO: 24527 - DNA, 201 bp, Homo sapiens; identical to SEQ ID NO: 11258

SEQ ID NO: 24528 - DNA, 201 bp, Homo sapiens; identical to SEQ ID NO: 11260

SEQ ID NO: 24529 - DNA, 201 bp, Homo sapiens; identical to SEQ ID NO: 11262

SEQ ID NO: 24530 - DNA, 201 bp, Homo sapiens; identical to SEQ ID NO: 11263

SEQ ID NO: 24531 - DNA, 201 bp, Homo sapiens; identical to SEQ ID NO: 11265

SEQ ID NO: 24532 - DNA, 201 bp, Homo sapiens; identical to SEQ ID NO: 11267

SEQ ID NO: 24533 - DNA, 201 bp, Homo sapiens; identical to SEQ ID NO: 11268

SEQ ID NO: 24534 - DNA, 201 bp, Homo sapiens; identical to SEQ ID NO: 11270

SEQ ID NO: 24535 - DNA, 201 bp, Homo sapiens; identical to SEQ ID NO: 11271

SEQ ID NO: 24536 - DNA, 201 bp, Homo sapiens; identical to SEQ ID NO: 11272

SEQ ID NO: 24537 - DNA, 201 bp, Homo sapiens; identical to SEQ ID NO: 11273

SEQ ID NO: 24538 - DNA, 201 bp, Homo sapiens; identical to SEQ ID NO: 11274

SEQ ID NO: 24539 - DNA, 201 bp, Homo sapiens; identical to SEQ ID NO: 11275

SEQ ID NO: 24540 - DNA, 201 bp, Homo sapiens; identical to SEQ ID NO: 11278

SEQ ID NO: 24541 - DNA, 201 bp, Homo sapiens; identical to SEQ ID NO: 11279

SEQ ID NO: 24542 - DNA, 201 bp, Homo sapiens; identical to SEQ ID NO: 11281

SEQ ID NO: 24543 - DNA, 201 bp, Homo sapiens; identical to SEQ ID NO: 11283

SEQ ID NO: 24544 - DNA, 201 bp, Homo sapiens; identical to SEQ ID NO: 11285

SEQ ID NO: 24545 - DNA, 201 bp, Homo sapiens; identical to SEQ ID NO: 11287

SEQ ID NO: 24546 - DNA, 201 bp, Homo sapiens; identical to SEQ ID NO: 11290

SEQ ID NO: 24547 - DNA, 201 bp, Homo sapiens; identical to SEQ ID NO: 11386

SEQ ID NO: 24548 - DNA, 201 bp, Homo sapiens; identical to SEQ ID NO: 11387

SEQ ID NO: 24549 - DNA, 201 bp, Homo sapiens; identical to SEQ ID NO: 11388

SEQ ID NO: 24550 - DNA, 201 bp, Homo sapiens; identical to SEQ ID NO: 11389

SEQ ID NO: 24551 - DNA, 201 bp, Homo sapiens; identical to SEQ ID NO: 11405

SEQ ID NO: 24552 - DNA, 201 bp, Homo sapiens; identical to SEQ ID NO: 11404

SEQ ID NO: 24553 - DNA, 201 bp, Homo sapiens; identical to SEQ ID NO: 11296

SEQ ID NO: 24554 - DNA, 201 bp, Homo sapiens; identical to SEQ ID NO: 11407

SEQ ID NO: 24555 - DNA, 201 bp, Homo sapiens; identical to SEQ ID NO: 11298

SEQ ID NO: 24556 - DNA, 201 bp, Homo sapiens; identical to SEQ ID NO: 11300

SEQ ID NO: 24557 - DNA, 201 bp, Homo sapiens; identical to SEQ ID NO: 11299

SEQ ID NO: 24558 - DNA, 201 bp, Homo sapiens; identical to SEQ ID NO: 11303

SEQ ID NO: 24559 - DNA, 201 bp, Homo sapiens; identical to SEQ ID NO: 11414

SEQ ID NO: 24560 - DNA, 201 bp, Homo sapiens; identical to SEQ ID NO: 11304

SEQ ID NO: 24561 - DNA, 201 bp, Homo sapiens; identical to SEQ ID NO: 11415

SEQ ID NO: 24562 - DNA, 201 bp, Homo sapiens; identical to SEQ ID NO: 11416

SEQ ID NO: 24563 - DNA, 201 bp, Homo sapiens; identical to SEQ ID NO: 11418

SEQ ID NO: 24564 - DNA, 201 bp, Homo sapiens; identical to SEQ ID NO: 11419

SEQ ID NO: 24565 - DNA, 201 bp, Homo sapiens; identical to SEQ ID NO: 11312

SEQ ID NO: 24566 - DNA, 201 bp, Homo sapiens; identical to SEQ ID NO: 11314

SEQ ID NO: 24567 - DNA, 201 bp, Homo sapiens; identical to SEQ ID NO: 11420

SEQ ID NO: 24568 - DNA, 201 bp, Homo sapiens; identical to SEQ ID NO: 11421

SEQ ID NO: 24569 - DNA, 201 bp, Homo sapiens; identical to SEQ ID NO: 11423

SEQ ID NO: 24570 - DNA, 201 bp, Homo sapiens; identical to SEQ ID NO: 11426

SEQ ID NO: 24571 - DNA, 201 bp, Homo sapiens; identical to SEQ ID NO: 11428

SEQ ID NO: 24572 - DNA, 201 bp, Homo sapiens; identical to SEQ ID NO: 11430

SEQ ID NO: 24573 - DNA, 201 bp, Homo sapiens; identical to SEQ ID NO: 11434

SEQ ID NO: 24574 - DNA, 201 bp, Homo sapiens; identical to SEQ ID NO: 11437

SEQ ID NO: 24575 - DNA, 201 bp, Homo sapiens; identical to SEQ ID NO: 11438

SEQ ID NO: 24576 - DNA, 201 bp, Homo sapiens; identical to SEQ ID NO: 11326

SEQ ID NO: 24577 - DNA, 201 bp, Homo sapiens; identical to SEQ ID NO: 11330

SEQ ID NO: 24578 - DNA, 201 bp, Homo sapiens; identical to SEQ ID NO: 11446

SEQ ID NO: 24579 - DNA, 201 bp, Homo sapiens; identical to SEQ ID NO: 11448

SEQ ID NO: 24580 - DNA, 201 bp, Homo sapiens; identical to SEQ ID NO: 11449

SEQ ID NO: 24581 - DNA, 201 bp, Homo sapiens; identical to SEQ ID NO: 11450

SEQ ID NO: 24582 - DNA, 201 bp, Homo sapiens; identical to SEQ ID NO: 11451

SEQ ID NO: 24583 - DNA, 201 bp, Homo sapiens; identical to SEQ ID NO: 11453

SEQ ID NO: 24584 - DNA, 201 bp, Homo sapiens; identical to SEQ ID NO: 11452

SEQ ID NO: 24585 - DNA, 201 bp, Homo sapiens; identical to SEQ ID NO: 11454

SEQ ID NO: 24586 - DNA, 201 bp, Homo sapiens; identical to SEQ ID NO: 11457

SEQ ID NO: 24587 - DNA, 201 bp, Homo sapiens; identical to SEQ ID NO: 11456

SEQ ID NO: 24588 - DNA, 201 bp, Homo sapiens; identical to SEQ ID NO: 11458

SEQ ID NO: 24589 - DNA, 201 bp, Homo sapiens; identical to SEQ ID NO: 11343

SEQ ID NO: 24590 - DNA, 201 bp, Homo sapiens; identical to SEQ ID NO: 11460

SEQ ID NO: 24591 - DNA, 201 bp, Homo sapiens; identical to SEQ ID NO: 11461

SEQ ID NO: 24592 - DNA, 201 bp, Homo sapiens
acaaggtccagaggaatccacagaggcgcctggtgctctaatggaggtggcagggggcatggcgggagacccgaggaggcatttagaaggagagagctatratccagactccttccctgcccgcaaggagcctccagtctgtgagaagccagactcaggtgctagtcactctgatgaaagggaaacaaagggcactgggag

SEQ ID NO: 24593 - DNA, 201 bp, Homo sapiens
agaaaaacaatgagagatgagtcaaaatacctgcatggtaggtagtgagctctctggcccagaggtaatcaaattgtggtgacatcagactggcaggagcrggatgaggaacaggagtttgggaaaaagggtttttcagttcccctgacgccacctgatcgctgagcttctgttatgtgcatgcaagtggggattcaagaa

SEQ ID NO: 24594 - DNA, 201 bp, Homo sapiens
gacatcagactggcaggagcaggatgaggaacaggagtttgggaaaaagggtttttcagttcccctgacgccacctgatcgctgagcttctgttatgtgcrtgcaagtggggattcaagaattcttaggaaaggtaatcttaggaagaaattgaggacgggaggagacagagaaggatgtggttgggaagcacctggccca

SEQ ID NO: 24595 - DNA, 201 bp, Homo sapiens
gaggagacagagaaggatgtggttgggaagcacctggcccatgggagtgggaggggaagcagataattccctgtctacttcagataccactaatgctattrtaaccattcccatttattgagcaacttctgtgtgctaagccctggcagcatcttaagaatgataataacagttattgaggcttcaaaatacttcacctgc

SEQ ID NO: 24596 - DNA, 201 bp, Homo sapiens
tgggatcttgagggtggagaggctgggaccagatcctgggaacaaggggcgtggggatcagctgtcaagagtgctggagcaggtggtgactgggggttcaraaatgcatctccagaaaggggagaggctgggactctgagtcctctccctaacccaggtactctcctctccttcctttcagaacagcactcctcctccacc

SEQ ID NO: 24597 - DNA, 201 bp, Homo sapiens
gggcatccgccgaccggcctgaccgcgcccgggctgccctcgctcaggaccgtggacgcgctgggtgtgctgaccggggcgcagcttttctcgctgcagarggaggagctgcgggcggtgagccccgaggagggggcacgtgtgtacagccaggtcaccgtgcagcgctcgctgctggaggtgagccggaccgctggtccc

SEQ ID NO: 24598 - DNA, 201 bp, Homo sapiens
tcccctcccgccacttgccagggctgacctcaccgccatcttaaccgggtgtccacctctctctgcctgcctggtgctggccccgcgtccccatcgccgcscccgtctgctcccctcagagggcttgctgacgctgcgggccaagccgccctcggaggccgagtacaccgacgtgctgcagaagatcaagtacgccttcag

SEQ ID NO: 24599 - DNA, 201 bp, Homo sapiens
agcagctaggcccccaagcaggaagcatgtggaaagtcagtttgcccatccataaaatggacctccgttgcctcacctcagtcatggatatgaagccaggrgcctcgggtccacttaatctgccagcctttcctccaggccagctgttgtgctggacagtgggaccacggaggcaaatcaagacacagccctgcatgagga

SEQ ID NO: 24600 - DNA, 201 bp, Homo sapiens
ttgaaagcagctaggcccccaagcaggaagcatgtggaaagtcagtttgcccatccataaaatggacctccgttgcctcacctcagtcatggatatgaagycaggggcctcgggtccacttaatctgccagcctttcctccaggccagctgttgtgctggacagtgggaccacggaggcaaatcaagacacagccctgcat

SEQ ID NO: 24601 - DNA, 201 bp, Homo sapiens
taataacccttccatcgctccccattaccttcgtcatgaagcccttgctgccctgcttggcatttccacaggatctgcccccagtcccacagtctctctcwttcctcttttcttcaccagcccagaagctgccccaaagccaagcgccaagtctatctatggtgagcggggggcaagggagccccaggcccatagaactgg

SEQ ID NO: 24602 - DNA, 201 bp, Homo sapiens
tatctctccaacactttctatgtgctagacccaattctgtgtgctgcagattaagtggaggactgatcacacaaaaatctttgcccttgtgaagcttgcattttttttttttttttttttgagatggagtcttgctctgtcacccaggctggagtgcagtggagcaatcttggctcactgcaatctccacctcccgggttc

SEQ ID NO: 24603 - DNA, 201 bp, Homo sapiens
gagtgcagtggcacgatctggactcactgcaacctccgcctcccaggttcaagtgattctcctgcctcagcctcccacgtagctgggactacaggcgcccrccaccacacccagctaatttttgtatttttagtagagacagggtttcaccatgttggccaagatggtctcaatctcttgactttgtgatccgcccacctc

SEQ ID NO: 24604 - DNA, 201 bp, Homo sapiens
ccacctctgcctcccaaagtgctgggattacaggcgtgagccaccgcgcccagcctacctgtcttcttaaagtccagctctggctctgagctctcctgctctaataataataataataataataataataataataataacccttccatcgctccccattaccttcgtcatgaagcccttgctgccctgcttggcatttcc

SEQ ID NO: 24605 - DNA, 201 bp, Homo sapiens
gggtctggactcctgagtcagagggaagaggtgctgggggtctggactcctgggtcagagggaagaggggctggggggctggactcctaggtttgagggargaggggctgggggcctggactcctgagtcagagggaagaggtgctgggggcctggactcctgggtcagagggaagaggggctggggggctggactcctgg

SEQ ID NO: 24606 - DNA, 201 bp, Homo sapiens
gagtcagagggaagaggtgctgggggtctggactcctgggtcagagggaagaggggctggggggctggactcctaggtttgagggaggaggggctgggggyctggactcctgagtcagagggaagaggtgctgggggcctggactcctgggtcagagggaagaggggctggggggctggactcctgggtcagagggaagag

SEQ ID NO: 24607 - DNA, 201 bp, Homo sapiens
agcgacacagcagggccgaggctgggaagtccgggggcgcggccggtccgcctggccccgcctgacccgactgtcttacttcctacagcaaagcgcccccsaggtcgctgtcaatgggtgagtgtccgccccagggcagggcaagggggtcaaggaggggtgcgtcccgggggctcccgatgctgactccgcccccttttt

SEQ ID NO: 24608 - DNA, 201 bp, Homo sapiens
gggtcagagggaagaggggctggggggctggactcctaggtttgagggaggaggggctgggggcctggactcctgagtcagagggaagaggtgctgggggsctggactcctgggtcagagggaagaggggctggggggctggactcctgggtcagagggaagaggggctggggggctggactcctgggtcagagggaagag

SEQ ID NO: 24609 - DNA, 201 bp, Homo sapiens
cgggcacgacgaacctgtcccgtccccgcacccacgccaaccacctccctccccacgccccaggcccggctgcgcggcaacatcgccgacccctcctctcyggagctgttgcacttccttttcgggcctctgcagatggtgagacccgccccaggccctcgggcccccctgcagcgggaggaatcgggttcgacttgtaga

SEQ ID NO: 24610 - DNA, 201 bp, Homo sapiens
tggcaaggaggcagtagacagagggtttgaatcccggactatgccatggtagagatcacactcccctaccacccagcaccaccgcctgacctgacctgtcttttttttttttttttttttttttgagatggggtctcactctgctgccaggctggagtgcagtggcacgatctggactcactgcaacctccgcctcccagg

SEQ ID NO: 24611 - DNA, 201 bp, Homo sapiens
gaggagttgcagcgcgaccgctcgcccgccgctgagaccccgcccctgcagcgccgcccgtcagtccgcgcagtgatcagcaccgtagagcggggcgcggrccgcggacgaccccaggcgaagcccattcccgaggcagaggaggcgcagaggcctgagccggtggggacctcgagcaacgctgactcggcctccccggac

SEQ ID NO: 24612 - DNA, 201 bp, Homo sapiens
tctgtcccctaggacatcctgaaccacgtgttcgacgacgtagagagctttgtatcgaggctgcagaagtcggcggaggcggccagggtgctggagcaccsggaacgcggccgcaggagccggcgccgggcggctgggggtaaggggcaccctggcgtgggatctgaaccccctcccgatctcttccaaatgtccccgctc

SEQ ID NO: 24613 - DNA, 201 bp, Homo sapiens
ctctgtcccctaggacatcctgaaccacgtgttcgacgacgtagagagctttgtatcgaggctgcagaagtcggcggaggcggccagggtgctggagcacsgggaacgcggccgcaggagccggcgccgggcggctgggggtaaggggcaccctggcgtgggatctgaaccccctcccgatctcttccaaatgtccccgct

SEQ ID NO: 24614 - DNA, 201 bp, Homo sapiens
tgcccgaggctctctgccatcagaccacactatatctctttctctctgttccttcatccccatcaatcgaaggcaaaaatgtgccttctctgatttccagsctcactcagcatagaccgtggaggcaacatatcttgaatgaagcaacaaagcagtaatgcacatgaatgcaccaaatgccaaaagctcgtttactcaaca

SEQ ID NO: 24615 - DNA, 201 bp, Homo sapiens
tacttcagataccactaatgctattgtaaccattcccatttattgagcaacttctgtgtgctaagccctggcagcatcttaagaatgataataacagttaytgaggcttcaaaatacttcacctgcatcatctgactgaatttgcccaacagccctaccagatggttactacgttacagaaagaaaaactgaggcaggaga

SEQ ID NO: 24616 - DNA, 201 bp, Homo sapiens
ggtcctgtgtaattatgacttccaggcccgcaacagcagtgagctgtcggtcaagcagcgggacgtactggaggttagaggagcgggaggctgaggggcasgaattagccagccctagctgcagacaggctctgaaccctctgttctttaccacacccaggtcctggatgacagtcgtaagtggtggaaggttcgggaccc

SEQ ID NO: 24617 - DNA, 201 bp, Homo sapiens
tcacctcagtcatggatatgaagccaggggcctcgggtccacttaatctgccagcctttcctccaggccagctgttgtgctggacagtgggaccacggagrcaaatcaagacacagccctgcatgaggaaggggtagacaaggtccagaggaatccacagaggcgcctggtgctctaatggaggtggcagggggcatggcg

SEQ ID NO: 24618 - DNA, 201 bp, Homo sapiens
gacaggtgtagggcgaggggtgagttcggggcgtggacgtgcgtgggttcacaggtgtgaacggtagccgcacgtgggctgggactgagctgaaaaatcgrccaggggcgaggcccgggtaggaagtgggtgcggcgtggggaggcgtggcctgacggtgtgattggcaggcggagctgatccgagaggacatccaggggg

SEQ ID NO: 24619 - DNA, 201 bp, Homo sapiens
tcccggactatgccatggtagagatcacactcccctaccacccagcaccaccgcctgacctgacctgtcttttttttttttttttttttttttgagatggrgtctcactctgctgccaggctggagtgcagtggcacgatctggactcactgcaacctccgcctcccaggttcaagtgattctcctgcctcagcctcccac

SEQ ID NO: 24620 - DNA, 201 bp, Homo sapiens
gcaaatcaagacacagccctgcatgaggaaggggtagacaaggtccagaggaatccacagaggcgcctggtgctctaatggaggtggcagggggcatggcrggagacccgaggaggcatttagaaggagagagctataatccagactccttccctgcccgcaaggagcctccagtctgtgagaagccagactcaggtgcta

SEQ ID NO: 24621 - DNA, 201 bp, Homo sapiens
tctcgatctcctgacctcgtgatccacccgcctcggcctcccaaagtgctgggattacaggtgtgagccactgcgcccggcctgttttctgttttttgagrtggagcctcgctctcttgcctaggctggagtgcagtggtgcaattatcggctcgccgcaacctctgcctcccgggttcaagtgattttcctgcctcagcc

SEQ ID NO: 24622 - DNA, 201 bp, Homo sapiens
cccagacttctggggctaagggagttgggaatggagacccggattcctgggcctaagggaggaagggggctgggagtgggtaaagtctgagaggttggatycctggatccccaaaaggctggaagaagccagtttgttttcccagggcctgggaagcaccatgcctgggctccctaggaggacagagccctggatattgga

SEQ ID NO: 24623 - DNA, 201 bp, Homo sapiens
agccgcgcctgggaggacccagttgagaaacagctacagcacgagcggaggcgccggcaggtgacccaagcgacacagcagggccgaggctgggaagtccsggggcgcggccggtccgcctggccccgcctgacccgactgtcttacttcctacagcaaagcgccccccaggtcgctgtcaatgggtgagtgtccgcccca

SEQ ID NO: 24624 - DNA, 201 bp, Homo sapiens
cggggctgggaggcagggggcatggtgattggaggagcataaggcgctgggaggtgggtggcatgatgattggaaaataggactaggagagtagggagggrttagaggcgtggcttagttgtgttggggcggggcttaggacagatgccaagattcaattggaggaaaggccaggaattaacgtgaaggaaagatttaaga

SEQ ID NO: 24625 - DNA, 201 bp, Homo sapiens
ctgctgccaggctggagtgcagtggcacgatctggactcactgcaacctccgcctcccaggttcaagtgattctcctgcctcagcctcccacgtagctggsactacaggcgcccgccaccacacccagctaatttttgtatttttagtagagacagggtttcaccatgttggccaagatggtctcaatctcttgactttgt

SEQ ID NO: 24626 - DNA, 201 bp, Homo sapiens
gcggcagcccagactgtttgcggcggcccagactctggcccaagccccgacactcaggaggaagccagagcctctctcctccctgcccagcctggggttasgggcccccactgcagagcagacaggcctgagctccagttcggccctcacactcagtgctgatgtaaccctggtcagaggacatcacctcctggagcctca

SEQ ID NO: 24627 - DNA, 201 bp, Homo sapiens
tgcagcccccatccttcactcaggcagttgcagggcccagaacacccctatcttctaggattgacactggctgtcaaactcatccttcaaggtgattcctrgcctgccctcctcctccaggcagcctgtcctcctcctccaggcagcctgtcctgaccctcagcagcctctcctggccttggcagagcccctcgtgtcctc

SEQ ID NO: 24628 - DNA, 201 bp, Homo sapiens
gggtcagagggaagaggggctgggggcctggactcctgggtcagagggaagaggggctgggggcctggactcctgggtcagagggaagaggggctgggggyctggactcctgggtcagagggaggaggggctggggggctggactcctgggtcagagggaagaggggctgggggcctggactcctgggtttgagggaggag

SEQ ID NO: 24629 - DNA, 201 bp, Homo sapiens
tgcattctagcctgggccacagaactagaccttgtctcaattaagaaaaaaaatggggataataggacccattccataggatgtggtgaggattatgcatmcacacacacacacacacacacacacatttatgatgtactgagaagatataagcacacaataagtatctccaaaattatcaagtggcaaagccaggattca

SEQ ID NO: 24630 - DNA, 201 bp, Homo sapiens
gggcctggactcctgggtcagagggaagaggggctgggggcctggactcctgggtcagagggaagaggggctgggggtctggactcctgggtcagagggargaggggctggggggctggactcctgggtcagagggaagaggggctgggggcctggactcctgggtttgagggaggaggggctgggggcctggactcctgg

SEQ ID NO: 24631 - DNA, 201 bp, Homo sapiens
gggtcagagggaagaggggctgggggcctggactcctgggtcagagggaagaggggctgggggtctggactcctgggtcagagggaggaggggctgggggsctggactcctgggtcagagggaagaggggctgggggcctggactcctgggtttgagggaggaggggctgggggcctggactcctgggtcagagggaagag

SEQ ID NO: 24632 - DNA, 201 bp, Homo sapiens
atgttagccaggatggtctcaatctcctgacctcgtgatccacacgcctcggcctcccaaagtgctgggattacaggcgtgagccaccacacccggccgctttttttttttttaagatggagtctcgctctgtcacccaggctggagtgcagtggcacgatcatctcggttcactgcaacctccacctcccaggttcaagt

SEQ ID NO: 24633 - DNA, 201 bp, Homo sapiens
ggctcactgcaagctccgccttccaggttcacgccattctcctgcctcagcctcccgagtagctgggactacaggtgcccaccaccacgcccggctaattktttgtatttttagtagagacggggtttcaccgtgttagccaggatggtctcgatctcctgacctcgtgatccacccgcctcggcctcccaaagtgctggg

SEQ ID NO: 24634 - DNA, 201 bp, Homo sapiens
tacaggtgcccaccaccacgcccggctaattttttgtatttttagtagagacggggtttcaccgtgttagccaggatggtctcgatctcctgacctcgtgwtccacccgcctcggcctcccaaagtgctgggattacaggtgtgagccactgcgcccggcctgttttctgttttttgagatggagcctcgctctcttgcct

SEQ ID NO: 24635 - DNA, 201 bp, Homo sapiens
aattatcggctcgccgcaacctctgcctcccgggttcaagtgattttcctgcctcagcctcctgagtagctgggattacaggcacccgccaccacacctgkataatttttgtgtttttagtacagatggggtttcaccatgttggctgggctggtctcgaactcctgtcctcaggtgatctgcctgcctcggcctcccaaa

SEQ ID NO: 24636 - DNA, 201 bp, Homo sapiens
ggccccgcgccccggaaccgcagctcagcccgggctcggacgcctccgaggtccgcgcctggctgcaggccaagggctttagctccgggtgagtggggccrgggccctctcggcgcgggttgatacggacgctgggagcggagcgttccgatcggccgggagtcggggggcggcagtcgtggagaccacagggagccggga

SEQ ID NO: 24637 - DNA, 201 bp, Homo sapiens
tcctctgcagccggttcccgcagggcgcacagctgcggggcgcgctgcggacgctgagcctcctggccgcgcagggcctgtgggcgcagacgtccgtgctycaccgagaggatctggaaaggctcggggtgcaggagtccgacctccgtctgttcctggacggagacatcctccgccaggacagagtctccaaaggctgct

SEQ ID NO: 24638 - DNA, 201 bp, Homo sapiens
ggttcccgcagggcgcacagctgcggggcgcgctgcggacgctgagcctcctggccgcgcagggcctgtgggcgcagacgtccgtgcttcaccgagaggayctggaaaggctcggggtgcaggagtccgacctccgtctgttcctggacggagacatcctccgccaggacagagtctccaaaggctgctactccttcatcc

SEQ ID NO: 24639 - DNA, 201 bp, Homo sapiens
aattatccaggcgtggtggcaggcacctgtaatatcagctacttgggaggctgaggcaggagaattacttgaacccaggaggcggaggttgcagtgaaccragatcctgccactggactccagtctgagtgacagagcgagactgcgtctcaaaaaaaaaaaaaaaaaaaaagaaaaagaaaaaaagggccgggcacaatg

SEQ ID NO: 24640 - DNA, 201 bp, Homo sapiens
acttgggaggctgaggcaggagaattacttgaacccaggaggcggaggttgcagtgaaccaagatcctgccactggactccagtctgagtgacagagcgaractgcgtctcaaaaaaaaaaaaaaaaaaaaagaaaaagaaaaaaagggccgggcacaatggctcacgcctgtagtcccagcactttgggggcccaaggtg

SEQ ID NO: 24641 - DNA, 201 bp, Homo sapiens
agcctcccaagtagctgggattacaggcgcctaccaccacgtctggctaatttttgtatttttagtagagacagggtttcaccatgttggccaggctggtytcaaactgctgacctcaaatgaactgtctgcctcagcctcacaaagtactgggattacaggcatgagccacctcacctggtggtgaagactctaaaggct

SEQ ID NO: 24642 - DNA, 201 bp, Homo sapiens
caaatctccttgatgcacaaagtaaccttttcttcccccattgtaccccaggttgaaaatcgatgactttaatgatgaactcaataagctgctggaagaartagaagaaaaaaacccacaactgattattgatactgagaaacatcatccctgggcagaaaggccttcttctcatgacttcatgatctgaatccccccgag

SEQ ID NO: 24643 - DNA, 201 bp, Homo sapiens
tgagaccagcctgaccaacatggtgatgaaacagcatctctactaaaaatacaaaaatttgctggacgtggtggcagacacctgtaatcccagctactccrggaggctgaggcaggagaatcacttaaatctaggaggcgggggttgctatgagccgagatcacgccattgcaccccagcctgggcaacaagagcaaaatt

SEQ ID NO: 24644 - DNA, 201 bp, Homo sapiens
gtgccactccagcctgggcaacagagtgacactctgtctcaaaaaaaaaagatgcaagcattttgaactggaaggagataagagaaaggaacaagtgatcsagttctaagtgtcatcttttcttttatgaaggcaataaaatcttgagcttatggtaaaatgcaaaattttccccccttctcctttttcagaagcagcttt

SEQ ID NO: 24645 - DNA, 201 bp, Homo sapiens
tcagaagcagctttgaaatcctttaataaaaggaagcctctatcattaggtaagttacctcatttataacttttattcttcatgtgagatctggggactcsggcctttgttttaaggagaatgtgctgagcactaagaatgcaaagaaatgccggacttagcatccctgctcccagggcggagctggtctcgcaggtgcgt

SEQ ID NO: 24646 - DNA, 201 bp, Homo sapiens
tttgctgaacagggtgatgttacccaaggccgccctgctggtcaccacgcggcccagggccctgagggacctccggatcctggcggaggagccgatctacrtaagggtggagggcttcctggaggaggacaggagggcctatttcctgagacactttggagacgaggaccaagccatgcgtgcctttgagctaatgaggag

SEQ ID NO: 24647 - DNA, 201 bp, Homo sapiens
gccctgctggtcaccacgcggcccagggccctgagggacctccggatcctggcggaggagccgatctacataagggtggagggcttcctggaggaggacargagggcctatttcctgagacactttggagacgaggaccaagccatgcgtgcctttgagctaatgaggagcaacgcggccctgttccagctgggctcggcc

SEQ ID NO: 24648 - DNA, 201 bp, Homo sapiens
tgaggagcaacgcggccctgttccagctgggctcggcccccgcggtgtgctggatcgtgtgcacgactctgaagctgcagatggagaagggggaggacccrgtccccacctgcctcacccgcacggggctgttcctgcgtttcctctgcagccggttcccgcagggcgcacagctgcggggcgcgctgcggacgctgagcc

SEQ ID NO: 24649 - DNA, 201 bp, Homo sapiens
catgttggtcaggctggtctcaaactcctgacctcaggtgatccgcccgcctcggcctcccaaagtgctgggattacaggcgtgagcaaccgcacccggcyaccttttttttttttttcctttgaggcaagaactcactatgttccccaggctggagtccagcagcacaatgatggctcgctgcaggctcgctccagctcc

SEQ ID NO: 24650 - DNA, 201 bp, Homo sapiens
agatacaagatgctgatcccattcagcaaccccagggtgcttcccgggcccttctcatacacggtggtgctgtatggtcctgcaggccttgggaaaaccaygctggcccagaaactaatgctagactgggcagaggacaacctcatccacaaattcaaatatgcgttctacctcagctgcagggagctcagccgcctgggc

SEQ ID NO: 24651 - DNA, 201 bp, Homo sapiens
gctagactgggcagaggacaacctcatccacaaattcaaatatgcgttctacctcagctgcagggagctcagccgcctgggcccgtgcagttttgcagagytggtcttcagggactggcctgaattgcaggatgacattccacacatcctagcccaagcacggaaaatcttgttcgtgattgacggctttgatgagctggg

SEQ ID NO: 24652 - DNA, 201 bp, Homo sapiens
ccgccaccacgcccggctaattttttgtatttttttagtagagacagggtttcaccgtgttagccaggatggtcttgatctcctgacctcgtgatccaccygcctcagcctcctaaagtgctgggaattacaggcatgagccatcacgccccacctgagactgtcttttaaaaaaaaaaaaaaaaaatcaatgtggaacac

SEQ ID NO: 24653 - DNA, 201 bp, Homo sapiens
tgcctccttaacagactttcaggtacttgggaatttgaaacaaatctccttgatgcacaaagtaaccttttcttcccccattgtaccccaggttgaaaatmgatgactttaatgatgaactcaataagctgctggaagaaatagaagaaaaaaacccacaactgattattgatactgagaaacatcatccctgggcagaaa

SEQ ID NO: 24654 - DNA, 201 bp, Homo sapiens
ctacccacttaaatttaatgacatattcagttcatggctggagacgatgagtagaaggaaaggattcttcccacacccactatatctaggccctgaaacaytaaaaaagaagtcccacaagcagtgagatgtcaccgactcactaactgtatcttcaaatgaatgtctagtttttttggttgtgtgtgtgtgtggtgtgtg

SEQ ID NO: 24655 - DNA, 201 bp, Homo sapiens
ctcatgacttcatgatctgaatccccccgagtcattcattctccatgaagtcatcgattttccaggtgttggtgaactgcctgtgactcctctcctccccsgcccctacccctcagggataatgagttcattgctgggctagatgttttagccatgattctgcctctgttttatacctgcacacatccttatctttgttac

SEQ ID NO: 24656 - DNA, 201 bp, Homo sapiens
gactcctctcctccccggcccctacccctcagggataatgagttcattgctgggctagatgttttagccatgattctgcctctgttttatacctgcacacrtccttatctttgttacatatgaaatatctgtatcacgggtatattgagagaaataaaggtgagagcattcacaaatgaagctgttacttaataatgggct

SEQ ID NO: 24657 - DNA, 201 bp, Homo sapiens
cctcccaaagtgctagaattacaggcatgagccatgtcaccccatgctgtgttttctcttaatctgtgttcttagaactataactgtaacataaattgcaygcaattggttgtaaatggaatcatttacttattttttaatgaatgatttgcaaatcaggtagtcttctgggccagtgtacgctcagactcccaatggaag

SEQ ID NO: 24658 - DNA, 201 bp, Homo sapiens
tgagggacctccggatcctggcggaggagccgatctacataagggtggagggcttcctggaggaggacaggagggcctatttcctgagacactttggagaygaggaccaagccatgcgtgcctttgagctaatgaggagcaacgcggccctgttccagctgggctcggcccccgcggtgtgctggatcgtgtgcacgactc

SEQ ID NO: 24659 - DNA, 201 bp, Homo sapiens
tcataggatcaccagtgcatgatagaaggtggggagttcacaagaaggggcttttggatgctggcacttgtggagctagccgggaaggttgaagttggacmtgtcaaccgtgttgccatttgtgattcttttgtaggttggaaaactgtcaccttacagaagccaattgcaaggaccttgctgctgtgttggttgtcagcc

SEQ ID NO: 24660 - DNA, 201 bp, Homo sapiens
ccgacaatgagcttctggatgagggtgctaagttgctgtacacaactttgagacaccccaagtgctttctgcagaggttgtcgtaagtctctcctctcttmcagagcagctgtgctttcgatctggggccacagacgagcaatggtcatgcctgacttggctgtatggaacctctcgctgatgtgaacacctgttcccatg

SEQ ID NO: 24661 - DNA, 201 bp, Homo sapiens
ctgctgctccagataattcaagtcggggtataacacaaccagtgagatgtaaaccaaagacgattccacggttagattctcaagaatgacttgttctgccrggcgcggtggctcacgcctgtcatcccagcactctgggaggccgaggtgggcagatcacctgagattgggagtttgagaccagcctgaccaacatggaga

SEQ ID NO: 24662 - DNA, 201 bp, Homo sapiens
gtggtgcatggtgcatgcctgcagtcccagctactcgggaggctgaggcaggagaatcacttgaacccaggaggcggaggttgctgtgagccgagattgcrccacctgggcaacaagagtgagactcagtctcaaaaaaaaaaaaaaaaatgacgtggtcctatttctcccacaggttggtgtcttgttccgctaccactc

SEQ ID NO: 24663 - DNA, 201 bp, Homo sapiens
ggagttcacaagaaggggcttttggatgctggcacttgtggagctagccgggaaggttgaagttggacatgtcaaccgtgttgccatttgtgattcttttstaggttggaaaactgtcaccttacagaagccaattgcaaggaccttgctgctgtgttggttgtcagccgggagctgacacacctgtgcttggccaagaac

SEQ ID NO: 24664 - DNA, 201 bp, Homo sapiens
tggtaagacctgggtagatgatggtaggaaaaaagtataagtagtagtagagtagtagtaatattctatagggatttggggaatgtagctggttttcgggtttttttttttcctctttatgtatgtatgtattttagagatgggatctcgccgtgttgcctaggctggtctcaaactcctgagctcaagagatctgcctgc

SEQ ID NO: 24665 - DNA, 201 bp, Homo sapiens
ttgtctctctactaaaaatacaaaaattagtcacgcatggtgggacatgcctgtaatcccagttactcaggaggctaaggcaggagaatcacttgaacttsggaggtggaggttgcagtgagctgagatggcaccactgaagtccagtctggccaatagagcaagactctctcaaaaaaaaaaaattataggacaaatctt

SEQ ID NO: 24666 - DNA, 201 bp, Homo sapiens
aaggcaggagaatcacttgaacttgggaggtggaggttgcagtgagctgagatggcaccactgaagtccagtctggccaatagagcaagactctctcaaamaaaaaaaattataggacaaatctttagaaaggaattggggcctggcatggtggctcatgcctgtaatctcagcactttaggaggcgggcagaacacctga

SEQ ID NO: 24667 - DNA, 201 bp, Homo sapiens
cacggaaaatcttgttcgtgattgacggctttgatgagctgggagccgcacctggggcgctgatcgaggacatctgcggggactgggagaagaagaagccrgtgcccgtcctcctggggagtttgctgaacagggtgatgttacccaaggccgccctgctggtcaccacgcggcccagggccctgagggacctccggatcc

SEQ ID NO: 24668 - DNA, 201 bp, Homo sapiens
atatattgaagacgaagttccgggagatgtggaagagctggcctggagatagcaaagaggtccaggttatggctgagagatacaagatgctgatcccattyagcaaccccagggtgcttcccgggcccttctcatacacggtggtgctgtatggtcctgcaggccttgggaaaaccacgctggcccagaaactaatgctag

SEQ ID NO: 24669 - DNA, 201 bp, Homo sapiens
gcctgtgggcgcagacgtccgtgcttcaccgagaggatctggaaaggctcggggtgcaggagtccgacctccgtctgttcctggacggagacatcctccgmcaggacagagtctccaaaggctgctactccttcatccacctcagcttccagcagtttctcactgccctgttctacaccctggagaaggaggaggaagagg

SEQ ID NO: 24670 - DNA, 201 bp, Homo sapiens
gttcctggacggagacatcctccgccaggacagagtctccaaaggctgctactccttcatccacctcagcttccagcagtttctcactgccctgttctacrccctggagaaggaggaggaagaggatagggacggccacacctgggacattggggacgtacagaagctgctttccggagtagaaagactcaggaaccccga

SEQ ID NO: 24671 - DNA, 201 bp, Homo sapiens
ctccgccaggacagagtctccaaaggctgctactccttcatccacctcagcttccagcagtttctcactgccctgttctacaccctggagaaggaggaggragaggatagggacggccacacctgggacattggggacgtacagaagctgctttccggagtagaaagactcaggaaccccgacctgatccaagcaggctac

SEQ ID NO: 24672 - DNA, 201 bp, Homo sapiens
tccgccaggacagagtctccaaaggctgctactccttcatccacctcagcttccagcagtttctcactgccctgttctacaccctggagaaggaggaggargaggatagggacggccacacctgggacattggggacgtacagaagctgctttccggagtagaaagactcaggaaccccgacctgatccaagcaggctact

SEQ ID NO: 24673 - DNA, 201 bp, Homo sapiens
aggacagagtctccaaaggctgctactccttcatccacctcagcttccagcagtttctcactgccctgttctacaccctggagaaggaggaggaagaggayagggacggccacacctgggacattggggacgtacagaagctgctttccggagtagaaagactcaggaaccccgacctgatccaagcaggctactactcct

SEQ ID NO: 24674 - DNA, 201 bp, Homo sapiens
gccacacctgggacattggggacgtacagaagctgctttccggagtagaaagactcaggaaccccgacctgatccaagcaggctactactcctttggcctygctaacgagaagagagccaaggagttggaggccacttttggctgccggatgtcaccggacatcaaacaggaattgctgcgatgcgacataagttgtaagg

SEQ ID NO: 24675 - DNA, 201 bp, Homo sapiens
ccacacctgggacattggggacgtacagaagctgctttccggagtagaaagactcaggaaccccgacctgatccaagcaggctactactcctttggcctcrctaacgagaagagagccaaggagttggaggccacttttggctgccggatgtcaccggacatcaaacaggaattgctgcgatgcgacataagttgtaaggg

SEQ ID NO: 24676 - DNA, 201 bp, Homo sapiens
aacacaaccagtgagatgtaaaccaaagacgattccacggttagattctcaagaatgacttgttctgccgggcgcggtggctcacgcctgtcatcccagcmctctgggaggccgaggtgggcagatcacctgagattgggagtttgagaccagcctgaccaacatggagagacccccacctctactgaaaatacaaaatta

SEQ ID NO: 24677 - DNA, 201 bp, Homo sapiens
tgggattacagctgtgaaccaccgcacctagcctgtgatcagtttcagatcagccttgcttactccacattccctcttatcttcctggtagcatttttgtyttttcttgagaaagagttttgcccttgtcgcccaggctagagtgcaatggtgtgatctcggctcgccacaacctccacctcccaggttcaagtgattctg

SEQ ID NO: 24678 - DNA, 201 bp, Homo sapiens
cctgagattgggagtttgagaccagcctgaccaacatggagagacccccacctctactgaaaatacaaaattagctgggcatggtggtgcatggtgcatgmctgcagtcccagctactcgggaggctgaggcaggagaatcacttgaacccaggaggcggaggttgctgtgagccgagattgcaccacctgggcaacaaga

SEQ ID NO: 24679 - DNA, 201 bp, Homo sapiens
ccgaggtgggcagatcacctgagattgggagtttgagaccagcctgaccaacatggagagacccccacctctactgaaaatacaaaattagctgggcatgktggtgcatggtgcatgcctgcagtcccagctactcgggaggctgaggcaggagaatcacttgaacccaggaggcggaggttgctgtgagccgagattgca

SEQ ID NO: 24680 - DNA, 201 bp, Homo sapiens
accccccgcccccaaaagacctctcagtaattccggtggatacaggaagtgctcagcaacgattacgccccgagggccaatcacagggctgcggccgagaragaagccttattagagctttctcaacctgcagccctcatctccgccggcgagtagggccaggtgttgggaggtgagtagctctccggcagctctgcaact

SEQ ID NO: 24681 - DNA, 201 bp, Homo sapiens
ttgtatttttttagtagagacagggtttcaccgtgttagccaggatggtcttgatctcctgacctcgtgatccacccgcctcagcctcctaaagtgctggsaattacaggcatgagccatcacgccccacctgagactgtcttttaaaaaaaaaaaaaaaaaatcaatgtggaacactcctttgccacctagaataatcag

SEQ ID NO: 24682 - DNA, 201 bp, Homo sapiens
tgtatctgcactgatggtttctgttcagagattcgattttatgttaacatctctggtattttttttttttttttttaagatggagttttactcttgcccaygctggcaatggcatgatctaggctcactgcaacctccggcttcaaggaggttgattctcctgcctcagcctcctgagtagctgggattacaggcactcac

SEQ ID NO: 24683 - DNA, 201 bp, Homo sapiens
ccccctgtaatcccagctactcggaaggctggggcacaagaatcgcgtgaacccaggaggcggaggttgaagtgagccaccgtgccagctgagaatccttyttacttctccaacttctgttggccacctgcattccttggcttgtggcccttcctccaacttcggcagagcatcttcaaacgttgccctggctcccttatc

SEQ ID NO: 24684 - DNA, 201 bp, Homo sapiens
cacttgagcctgggaggaagaagttacagcgaattgagatcacgtcacctcactccagcctgggtgacagtgagatcctgtctcaaaaaaaaaaaaaaaamaaaaaaaacaaaggcgcctttttaatcactcactgacacgtgtagaggagcaaaaagtttgagttgctggttggcccaggaggtcaaggctgcagtgagc

SEQ ID NO: 24685 - DNA, 201 bp, Homo sapiens
ggttgtcgtaagtctctcctctcttccagagcagctgtgctttcgatctggggccacagacgagcaatggtcatgcctgacttggctgtatggaacctctygctgatgtgaacacctgttcccatgtttagatccaggccgatggcctgtgaattttgttcttctctcattcctattccttcataggatcaccagtgcatg

SEQ ID NO: 24686 - DNA, 201 bp, Homo sapiens
caaaaaaaaaaaaaaaaatgacgtggtcctatttctcccacaggttggtgtcttgttccgctaccactcagcagtgggctgatctctccttggcccttgargtcaaccagtccctgacgtgcgtaaacctctccgacaatgagcttctggatgagggtgctaagttgctgtacacaactttgagacaccccaagtgctttc

SEQ ID NO: 24687 - DNA, 201 bp, Homo sapiens
gttgtctgatggtggtgctaataagtgattacatggtccagctttcaattgtactcatttgtcaggggtatatgcccagagaaaccctaaatacttcagcygtgatggacacacatttggtgtaaccctttcttctcttccctatagatcccaggatgatcagcacatgcttcctttctggacggacctttgttccatatt

SEQ ID NO: 24688 - DNA, 201 bp, Homo sapiens
gtcgaaacctgcagaaaatgtcactgcaggtaataaaggagaatctcccggagaatgtcactgcgtctgaatcagacgccgaggttgagaggtgagaaccrtttcactctaccagtcgttccatctttagcctcatcccatgcccccttaggaagaggccagagcctcctatgcactgtggcttagggtcaggaattccct

SEQ ID NO: 24689 - DNA, 201 bp, Homo sapiens
ccaaaagacctctcagtaattccggtggatacaggaagtgctcagcaacgattacgccccgagggccaatcacagggctgcggccgagaaagaagccttawtagagctttctcaacctgcagccctcatctccgccggcgagtagggccaggtgttgggaggtgagtagctctccggcagctctgcaacttcatttcttta

SEQ ID NO: 24690 - DNA, 201 bp, Homo sapiens
agccagggtgacaaagtgagactccgtctcaaaaaaaaaaaaaaaaaaaatacaaaaagtagctgagcgtggtggtgggtgcccataatcccagctagtcrggaggctgaggcaggagaactgtttgaacctgggaggcagaggttgcagtgagctgagatcgtactactgtactccagcctgggctgcagagtgaaacta

SEQ ID NO: 24691 - DNA, 201 bp, Homo sapiens
ttgtgacagctactgggtggagatggcgagcctccaggtctttgaaaagatgcaccgaatggatctgtctgagagagcaaaggatgaagtcagaggtgagyggaaatcggtccacactgtgtcctaggaggaagcaggcgtcctctccaggactttagaaattcagaaggccaggcgcgctggctcacgcctgtcgtccca

SEQ ID NO: 24692 - DNA, 201 bp, Homo sapiens
ctttatcttctatcagagatcattcactcatggttcatgcttctcctgtatgatgattcagaataccagctattgacatttttcaagcaagaacccttcargaacatcaagttgccccttttctgttagtcctctggtttgagagctctccccttgggaagctgtccagtggctgcccaggcgatgagaacctacatgcat

SEQ ID NO: 24693 - DNA, 201 bp, Homo sapiens
ggttcaagtaattctgctgcctcagcctcccaagttgctgggattacaggcacccgccaccacgcccggctaatttttgtgcatttagtggagctggtttygccacattgccaggctggtctcgaactcatgacctcaggtgacctgccctcctcaggctcccaaagtgctgggattataggcatgagccaccatgcccag

SEQ ID NO: 24694 - DNA, 201 bp, Homo sapiens
cccgagtagctgggactacaggcgcccaccaccacgcctggctaatttttttgtgtttttagtagagacggggtttcaccgtgttagccaggatggtctcratctcctgaccttgtgatccgcccgcctcggcctcccaaagtgctgggattacaggcgtgagccaccgcgcccggcccctgaagattgtgttttgagatg

SEQ ID NO: 24695 - DNA, 201 bp, Homo sapiens
caggcgtgagccaccgcgcccggctgtgtgtttgcattatcatattcagcccagttttcacgaagtttcttgtctcctgggtgatccacgtagctccccasttccttatctgatctatgcttgtcctttcattgttgtgttactactttgctataatgagagagtgttttcgctttataggttaacttttagaacctgagc

SEQ ID NO: 24696 - DNA, 201 bp, Homo sapiens
tgcattatcatattcagcccagttttcacgaagtttcttgtctcctgggtgatccacgtagctccccacttccttatctgatctatgcttgtcctttcatkgttgtgttactactttgctataatgagagagtgttttcgctttataggttaacttttagaacctgagcagcccctcagggaaaaccctgacagtagctgg

SEQ ID NO: 24697 - DNA, 201 bp, Homo sapiens
ggaactggcatttgagacaggagtgctaatcaccatccctctccactcctcccttgattgtcatcacagctcccacgtgggacaagatggtgtcttcggcrcagatgggcttcaacctgcaggctctcctggagcagctcagccaggatgagttgagcaagttcaagtatctgatcacgaccttctccctggcacacgagc

SEQ ID NO: 24698 - DNA, 201 bp, Homo sapiens
ggcgtgagccaccgcacccagccagcaagtgcatttagaactactctactttctaccccataacttttttttttgtttgtttgagacaagtctcactctgycacccaggatggagtgcagcagcacaatctcagcttattgcaactcccgccccctgggttcaagtgtttctcctgcatcagcctcttgaatagctaggat

SEQ ID NO: 24699 - DNA, 201 bp, Homo sapiens
ttcaagaccagcctggccaacatggggaaaccctgtctctactaaaaatacaaaacttagctgggtgtggtggcacgcgcatgtgtgtacacacacacacmcccctgtaatcccagctactcggaaggctggggcacaagaatcgcgtgaacccaggaggcggaggttgaagtgagccaccgtgccagctgagaatccttt

SEQ ID NO: 24700 - DNA, 201 bp, Homo sapiens
  misc_feature (1)...(201): n = A,T,C or G, or insertion/deletion polymorphism (see Tables 1-2)
aaaacttagctgggtgtggtggcacgcgcatgtgtgtacacacacacacccccctgtaatcccagctactcggaaggctggggcacaagaatcgcgtgaanccaggaggcggaggttgaagtgagccaccgtgccagctgagaatcctttttacttctccaacttctgttggccacctgcattccttggcttgtggccctt

SEQ ID NO: 24701 - DNA, 201 bp, Homo sapiens
agtacagtggtgaaatcagctcactgcatcctcaaacttctgggttcaagtgatgttcctgagtacctgggatgacaggtattaagtgtgcaccatcatgyccagctaacttaagtgggggtttttttttgtgtttttttttttttttttttttttggaaagacaaaatctcactatgttgtccaggctggtcttgaactc

SEQ ID NO: 24702 - DNA, 201 bp, Homo sapiens
tgtaacctccacctcccaggttcaagcgattctcctgattctcctgactcagcctcctgagtagctgggattataggcacctgccaccacacccagctaatttttttttttttttttgagacgaagtcttgttcttgtcacccaggctggagtatagtggcaccatccctgttcactgcaacctccgcctcccagattcaa

SEQ ID NO: 24703 - DNA, 201 bp, Homo sapiens
ttttatgaaggcaataaaatcttgagcttatggtaaaatgcaaaattttccccccttctcctttttcagaagcagctttgaaatcctttaataaaaggaarcctctatcattaggtaagttacctcatttataacttttattcttcatgtgagatctggggactcgggcctttgttttaaggagaatgtgctgagcactaa

SEQ ID NO: 24704 - DNA, 201 bp, Homo sapiens
tttctaggctttggaactgcgacataactagcgatggctgctgcgatctcacaaagcttctccaagaaaaatcaagcctgttgtgtttggatctggggctraatcacataggagttaagggaatgaagttcctgtgtgaggctttgaggaaaccactgtgcaacttgagatgtctgtggtgagttaacttataagttcaac

SEQ ID NO: 24705 - DNA, 201 bp, Homo sapiens
tgtgtgccaccacgcccagctaattttttgtattttagtagagacagggtttcaccgtgttagtcaggatggtctggatctcctaacctcgtgatccgtcygcctcagcctcccaaagtgctgggatgacaggcgtgagccactgtgcccagcctagcacacaatcttgacaaagaatttcggtgcgacttggggtactgt

SEQ ID NO: 24706 - DNA, 201 bp, Homo sapiens
cttgctctgtcacccaagctggagtgcagtggcgcaatctcggctcactgcaagctccatctcccgggttcacgccattctgcctcagcctccccagtagytgggactacaggcgcccgccacacgcccggctaattttttgtatttgtagtagagacagggtttcaccgtgttagccaggatggtctcgatctcctgacc

SEQ ID NO: 24707 - DNA, 201 bp, Homo sapiens
caaaggctgctactccttcatccacctcagcttccagcagtttctcactgccctgttctacaccctggagaaggaggaggaagaggatagggacggccacrcctgggacattggggacgtacagaagctgctttccggagtagaaagactcaggaaccccgacctgatccaagcaggctactactcctttggcctcgctaa

SEQ ID NO: 24708 - DNA, 201 bp, Homo sapiens
catctctactaaaaatataaaattaggtgggcgtggtagcgcatacttgtaatcctagctactcaggaggctgaggcaggagaatcacttgaacccgggarggcggaggttgcggggagcctagatcataccattgctctccagcctgcgcagcaagagagaaactgtctcaaaaaataaaataaaataaaattcagtggt

SEQ ID NO: 24709 - DNA, 201 bp, Homo sapiens
gggacggccacacctgggacattggggacgtacagaagctgctttccggagtagaaagactcaggaaccccgacctgatccaagcaggctactactccttyggcctcgctaacgagaagagagccaaggagttggaggccacttttggctgccggatgtcaccggacatcaaacaggaattgctgcgatgcgacataagtt

SEQ ID NO: 24710 - DNA, 201 bp, Homo sapiens
tttttttttttttgagacaaagtctagctctgtttcccaggctggagtacagtggcgctatctcagctcactgcaacttccacctcccaggttcaagcaaytctcgtgcctcagccttctaagtagctgggactacagccgcctgtcaccaacctggctaattttcgtatttttagtcgatatagggtttcactatgttgg

SEQ ID NO: 24711 - DNA, 201 bp, Homo sapiens
ctaatttttgcatttgttagttttatttttagtagacagggtttcaccatgttgggcaggctggtcttgaactcctgacctcaggtgatccacccacttcrgcctcccaaagtgctgggattacaggcatgagccaccgtacctagcccacattgacttttgatacagcaagtatttcttgctatggctctgtataataga

SEQ ID NO: 24712 - DNA, 201 bp, Homo sapiens
cttttggctgccggatgtcaccggacatcaaacaggaattgctgcgatgcgacataagttgtaagggtggacattcaacggtgacagacctgcaggagctsctcggctgtctgtacgagtctcaggaggaggagctggtgaaggaggtgatggctcagttcaaagaaatatccctgcacttaaatgcagtagacgttgtgc

SEQ ID NO: 24713 - DNA, 201 bp, Homo sapiens
ttccacctcccaggttcaagcaattctcgtgcctcagccttctaagtagctgggactacagccgcctgtcaccaacctggctaattttcgtatttttagtygatatagggtttcactatgttggccaggctggtctcaagctccagacctcaggtgatcctcccaccttggactcccaaagtgctgtgattacaggcgtga

SEQ ID NO: 24714 - DNA, 201 bp, Homo sapiens
tgttggccaggctggtctcaagctccagacctcaggtgatcctcccaccttggactcccaaagtgctgtgattacaggcgtgagccaccgcacccggccctgttgttgtttttaaaatagagacagggtcttaagttgccaggctggtctggaacttctggactggagtgatcacccacctgagcttcccaaagtgcgggg

SEQ ID NO: 24715 - DNA, 201 bp, Homo sapiens
taccagtcgttccatctttagcctcatcccatgcccccttaggaagaggccagagcctcctatgcactgtggcttagggtcaggaattccctcttgttggrctctttgtttgtttttgttttgagatggagtcttgctctgtcgctcaggctggagcgcagtggcgcgatcttggctccctgcaacctccgcctcccgggt

SEQ ID NO: 24716 - DNA, 201 bp, Homo sapiens
gttggccaggctggtctcaagctccagacctcaggtgatcctcccaccttggactcccaaagtgctgtgattacaggcgtgagccaccgcacccggccctgttgttgtttttaaaatagagacagggtcttaagttgccaggctggtctggaacttctggactggagtgatcacccacctgagcttcccaaagtgcgggga

SEQ ID NO: 24717 - DNA, 201 bp, Homo sapiens
gtcaggaattccctcttgttggactctttgtttgtttttgttttgagatggagtcttgctctgtcgctcaggctggagcgcagtggcgcgatcttggctcmctgcaacctccgcctcccgggttcaagtgattcttctgcctcagcctcctgagtagctgggactacaggcgcctgccaccttgcccggctaatttttata

SEQ ID NO: 24718 - DNA, 201 bp, Homo sapiens
ttggccaggctggtctcaagctccagacctcaggtgatcctcccaccttggactcccaaagtgctgtgattacaggcgtgagccaccgcacccggccctgttgttgtttttaaaatagagacagggtcttaagttgccaggctggtctggaacttctggactggagtgatcacccacctgagcttcccaaagtgcggggat

SEQ ID NO: 24719 - DNA, 201 bp, Homo sapiens
cagctcactgcagccttaacttccctggctcaggtgatcctcccacctcagcctcctcagtagctgggactacaggtgcatgccactatgcccagcacaattttttttttttttgtatttttttgtagagacagggttttgccatgttgcccaggctggtctcaaactccaagcaatcctcccaccttggcttcccaaagt

SEQ ID NO: 24720 - DNA, 201 bp, Homo sapiens
agctcactgcagccttaacttccctggctcaggtgatcctcccacctcagcctcctcagtagctgggactacaggtgcatgccactatgcccagcacaattttttttttttttgtatttttttgtagagacagggttttgccatgttgcccaggctggtctcaaactccaagcaatcctcccaccttggcttcccaaagtg

SEQ ID NO: 24721 - DNA, 201 bp, Homo sapiens
ctgggcacagtggtgaatgcctgtaatcccagctacttgggaggctgaggcaggagaattgcttgaatccgggaggcagaggttgtagtgagccgagattrcagcactgcactccagccagggtgacaaagtgagactccgtctcaaaaaaaaaaaaaaaaaaaatacaaaaagtagctgagcgtggtggtgggtgcccat

SEQ ID NO: 24722 - DNA, 201 bp, Homo sapiens
tgaatccgggaggcagaggttgtagtgagccgagattgcagcactgcactccagccagggtgacaaagtgagactccgtctcaaaaaaaaaaaaaaaaaawatacaaaaagtagctgagcgtggtggtgggtgcccataatcccagctagtcgggaggctgaggcaggagaactgtttgaacctgggaggcagaggttgca

SEQ ID NO: 24723 - DNA, 201 bp, Homo sapiens
caggcatgattcaccatgcccggcccaaatatatttttttaagacagggtcttgctgtgttgctcaggctggagtacagtggtgaaatcagctcactgcakcctcaaacttctgggttcaagtgatgttcctgagtacctgggatgacaggtattaagtgtgcaccatcatgtccagctaacttaagtgggggtttttttt

SEQ ID NO: 24724 - DNA, 201 bp, Homo sapiens
tcactatgttgcccaggctgggagtttgttcttgaagaagcagggtagatggtgagtgtccttgttcgtggcacagcaggaactggcatttgagacaggastgctaatcaccatccctctccactcctcccttgattgtcatcacagctcccacgtgggacaagatggtgtcttcggcgcagatgggcttcaacctgcagg

SEQ ID NO: 24725 - DNA, 201 bp, Homo sapiens
acttggggtactgtggtgcctgctctatcatcatgcttcagcaggaaatgtgggtgaatagtgcctggtggcatggcaggtaaagaaatgttttgttttgtttttttttttgagacagtcttgctctgtcacccaagctggagtgcagtggcgcaatctcggctcactgcaagctccatctcccgggttcacgccattctg

SEQ ID NO: 24726 - DNA, 201 bp, Homo sapiens
taaacatggaaaaaatagttcctaaagtttaaatatatcgagcccctggtttccatttaagtacgatacaggtgtacacactaaagatttcactttcgttytcttttccctaggttcaaaaacatttccccagctgatgctcatcggaacctctgcctagctcttcgaggtcacaagactgtaacgtatctgacccttcaa

SEQ ID NO: 24727 - DNA, 201 bp, Homo sapiens
tttagtagagacacggttttaccatgttaggttggtcttgaactccttgacctcaggtgatccatccacctcggcctcccaaagtgctgggattacaggcrtgaaccaccgtgcccggcctgagacttctgttggtcatgcagatccccaacacacgagggtgggcttggcttgccggagggcatcgatcagcactggctg

SEQ ID NO: 24728 - DNA, 201 bp, Homo sapiens
agctaccacaagcttatgtggcaattttgtgtaaataagaaaaagttcgttattctgactagaaacagtactaagggcagatgacccaggatgcagcatgrgctgaacttgagtttctacttgccttgaacagtaaacaccctggacaaccatacgtgaggaccctgaatccaaagaaactcccagaatctttatcatctt

SEQ ID NO: 24729 - DNA, 201 bp, Homo sapiens
  misc_feature (1)...(201): n = A,T,C or G, or insertion/deletion polymorphism (see Tables 1-2)
gtggcaattttgtgtaaataagaaaaagttcgttattctgactagaaacagtactaagggcagatgacccaggatgcagcatgggctgaacttgagtttcnacttgccttgaacagtaaacaccctggacaaccatacgtgaggaccctgaatccaaagaaactcccagaatctttatcatctttttttttttttttatga

SEQ ID NO: 24730 - DNA, 201 bp, Homo sapiens
tacttgccttgaacagtaaacaccctggacaaccatacgtgaggaccctgaatccaaagaaactcccagaatctttatcatctttttttttttttttatgragtcttgctctgttgcccaggccaaagtgcaatggcacgatcttggctcactgcaacctctgtctcctgggttcaagtaattctgctgcctcagcctccc

SEQ ID NO: 24731 - DNA, 201 bp, Homo sapiens
ctgcctcagcctcccaagttgctgggattacaggcacccgccaccacgcccggctaatttttgtgcatttagtggagctggtttcgccacattgccaggcyggtctcgaactcatgacctcaggtgacctgccctcctcaggctcccaaagtgctgggattataggcatgagccaccatgcccagccagagtccttatgtt

SEQ ID NO: 24732 - DNA, 201 bp, Homo sapiens
ttttgatttgcatttctctgatggccagtgatgatgagcattttttcatgtgttttttggctgcataaatgtcttcttttgagaagtgtctgttcatgtcsttcgcccactttttgatggggttgtttgtttttttcttgtaaattattttctacctatttctatcgctttcaggtatcgtacagttggcctaacatatct

SEQ ID NO: 24733 - DNA, 201 bp, Homo sapiens
agaataatgggatgcagggtgagggggaatattgggtgaattaaagatttgggtcactaatttctttctttttttctcaagatatagtcttgctctgtctyctaggctggagtgcagtgccacaatcttggttcactgcaacctctgcctcccgggttcaagtgattcttctccgtcaacctcccaagtagctgggattac

SEQ ID NO: 24734 - DNA, 201 bp, Homo sapiens
caagcatgtcccaccatgcctggctgatttttttttttttttttttgtattctaaatagagatggggtttcaccatgttagccaggatagtctcgatgtcrtgacctcatgatctgcccgcctcggcctcccaaagtgttgggattacaggcgtgagccaccgcacccagccagcaagtgcatttagaactactctacttt

SEQ ID NO: 24735 - DNA, 201 bp, Homo sapiens
atatttagtagagccggggtttcaccgtgttggctgggctggtctcgaactcctgacctcaagtgacatccatcttccaaaatgctgggattacagccatrtgccaccacgcccagctaattcttgtatttttaggagaaatggggtttcatcatgttgttccggctggtcttaaactcctggcctcatgatccacctgcc

SEQ ID NO: 24736 - DNA, 201 bp, Homo sapiens
ggccaggagtttgagaccagtcaggccaatgtggtgaaaccctgtctctactaaaaatataaaaaaatcagccgggcgtggtggcacactcctgtagtccyagctacttgggaggctgaggcaggaggattgcttgaaccagagagtcagaggttgcagtgagccaagatcgtgccactgcgctccagcctgggtgacagc

SEQ ID NO: 24737 - DNA, 201 bp, Homo sapiens
aaacatcatccctgggcagaaaggccttcttctcatgacttcatgatctgaatccccccgagtcattcattctccatgaagtcatcgattttccaggtgtkggtgaactgcctgtgactcctctcctccccggcccctacccctcagggataatgagttcattgctgggctagatgttttagccatgattctgcctctgtt

SEQ ID NO: 24738 - DNA, 201 bp, Homo sapiens
tgaggcaggaggattgcttgaaccagagagtcagaggttgcagtgagccaagatcgtgccactgcgctccagcctgggtgacagcaagactccatctcaaraaaaaaaaacaaacaaacatggtattaattacacaatggaatactcctcaaccttaaggaactcctatctttttatttaaaaattgccagttttatttca

SEQ ID NO: 24739 - DNA, 201 bp, Homo sapiens
aaaatcgatgactttaatgatgaactcaataagctgctggaagaaatagaagaaaaaaacccacaactgattattgatactgagaaacatcatccctgggmagaaaggccttcttctcatgacttcatgatctgaatccccccgagtcattcattctccatgaagtcatcgattttccaggtgttggtgaactgcctgtga

SEQ ID NO: 24740 - DNA, 201 bp, Homo sapiens
gttacaagtttgaaaacggcaggaggaaacccagagagttgtaaacttacgaaggtctgggctctgaaaaagatacaaattttctttccatgccaatagcrctcacacagacatggtgaatgttcctgaaacccgccggactttctgtaagaagtgtggcaagcaccacccccacaaagtgacacaaggcaaggattcttg

SEQ ID NO: 24741 - DNA, 201 bp, Homo sapiens
tcctgagtagctgggaccacaggcacttgccaccatgcctggctaatttttttcactttttgtagagacagggtcttgctatgttgcccaggctggcctcraattactaaactcaatcagtcctcctgcctcaccctcccaaactgctggggtacaggtgtgagccatgacacctggcccttaccagctacttatatcctg

SEQ ID NO: 24742 - DNA, 201 bp, Homo sapiens
cctcctgcctcaccctcccaaactgctggggtacaggtgtgagccatgacacctggcccttaccagctacttatatcctgaagattattattatttttttwttttttgagatagagtctctctctgttgcccaggctggagtgcagtggcgtgatctcggctcactgcaagctccgcctcccgggttcatgccattctcct

SEQ ID NO: 24743 - DNA, 201 bp, Homo sapiens
ttcaattgtactcatttgtcaggggtatatgcccagagaaaccctaaatacttcagccgtgatggacacacatttggtgtaaccctttcttctcttccctrtagatcccaggatgatcagcacatgcttcctttctggacggacctttgttccatatttggatcaaataaggatctgatgggtctagcaatcaatgatagc

SEQ ID NO: 24744 - DNA, 201 bp, Homo sapiens
gcgatcttggctccctgcaacctccgcctcccgggttcaagtgattcttctgcctcagcctcctgagtagctgggactacaggcgcctgccaccttgcccrgctaatttttatattttcattagagacgggatctcagcatgttggccagtctggtcttgaactccgcctgacctcaggtgatccacctgcctcagcctcc

SEQ ID NO: 24745 - DNA, 201 bp, Homo sapiens
catggtccagctttcaattgtactcatttgtcaggggtatatgcccagagaaaccctaaatacttcagccgtgatggacacacatttggtgtaaccctttyttctcttccctatagatcccaggatgatcagcacatgcttcctttctggacggacctttgttccatatttggatcaaataaggatctgatgggtctagca

SEQ ID NO: 24746 - DNA, 201 bp, Homo sapiens
tagacgttgtgccatcttcattctgcgtcaagcactgtcgaaacctgcagaaaatgtcactgcaggtaataaaggagaatctcccggagaatgtcactgcktctgaatcagacgccgaggttgagaggtgagaaccgtttcactctaccagtcgttccatctttagcctcatcccatgcccccttaggaagaggccagagc

SEQ ID NO: 24747 - DNA, 201 bp, Homo sapiens
cagtaagacctgggaagctgaaacacgatcgcgtttgttggaaatctataaatacatacaaagcggggaagggtaagcttggcctttgaatctggataagstagagacttttcttttttgagatggaggcttgctctgtcacctaggctgaagtgcagtggtacgacctcggctgactgcaacctctacctcctgggttca

SEQ ID NO: 24748 - DNA, 201 bp, Homo sapiens
cggctaatttttatattttcattagagacgggatctcagcatgttggccagtctggtcttgaactccgcctgacctcaggtgatccacctgcctcagcctccaaagtgggattacaggcatgattcaccatgcccggcccaaatatatttttttaagacagggtcttgctgtgttgctcaggctggagtacagtggtgaaa

SEQ ID NO: 24749 - DNA, 201 bp, Homo sapiens
tggggactcgggcctttgttttaaggagaatgtgctgagcactaagaatgcaaagaaatgccggacttagcatccctgctcccagggcggagctggtctcscaggtgcgtagcagtaagacctgggaagctgaaacacgatcgcgtttgttggaaatctataaatacatacaaagcggggaagggtaagcttggcctttga

SEQ ID NO: 24750 - DNA, 201 bp, Homo sapiens
cccaggctgggagtttgttcttgaagaagcagggtagatggtgagtgtccttgttcgtggcacagcaggaactggcatttgagacaggagtgctaatcacyatccctctccactcctcccttgattgtcatcacagctcccacgtgggacaagatggtgtcttcggcgcagatgggcttcaacctgcaggctctcctggag

SEQ ID NO: 24751 - DNA, 201 bp, Homo sapiens
tttaatgaatgatttgcaaatcaggtagtcttctgggccagtgtacgctcagactcccaatggaagctattggaagctacatgctcaatgtgatcctcctkttaatactaaaatcacaggacacgtggcctggcatagtggctcacgcctataatcccatcaccttgggaggccgaagcaaggcagatcccttgagggcag

SEQ ID NO: 24752 - DNA, 201 bp, Homo sapiens
gggctgaacttgagtttctacttgccttgaacagtaaacaccctggacaaccatacgtgaggaccctgaatccaaagaaactcccagaatctttatcatctttttttttttttttatgaagtcttgctctgttgcccaggccaaagtgcaatggcacgatcttggctcactgcaacctctgtctcctgggttcaagtaatt

SEQ ID NO: 24753 - DNA, 201 bp, Homo sapiens
aggttgaagtgagccaccgtgccagctgagaatcctttttacttctccaacttctgttggccacctgcattccttggcttgtggcccttcctccaacttcrgcagagcatcttcaaacgttgccctggctcccttatcacgtcacctcctgctggctttgactctcagctccctcttatgaggatccctgtgattgctgga

SEQ ID NO: 24754 - DNA, 201 bp, Homo sapiens
tcctgacctcaggtgatccgcccatctcggcctcccaaagtgctgggattacaggcgtgagccactgcgccaggccctatgtctaagttctagtctgtgtyatgcaaagaacacctgtgaaattttaaggatacagtgcctcaagccattcagccaaaagccactgcccagcaccccacattcagagaggtgggaattggg

SEQ ID NO: 24755 - DNA, 201 bp, Homo sapiens
ccgggttcatgccattctcctgcctcagcctcccgagtagctgggactacaggcgcccaccaccacgcctggctaatttttttgtgtttttagtagagackgggtttcaccgtgttagccaggatggtctcgatctcctgaccttgtgatccgcccgcctcggcctcccaaagtgctgggattacaggcgtgagccaccgc

SEQ ID NO: 24756 - DNA, 201 bp, Homo sapiens
tggcctcatgatccacctgccttggcctgccaaagtcctgggattacaggcatgagccactgtgcccagccactcatttcttatgaatttattctaacacrttttccggatgaacagggcaccttgaaacataggttagtgggctgggtatggtggcttctgcctgtaatcccagtactttgggaggcctaggctggtgta

SEQ ID NO: 24757 - DNA, 201 bp, Homo sapiens
cctcaagccattcagccaaaagccactgcccagcaccccacattcagagaggtgggaattgggccaggcacagtggctcatacctgtaatcccagcacttygggaggccgaagcgggcggatcacttaaggtcaggagctcaagaccagcctggccaacttgaaactccatctctactaaaatataaaaattagccgagca

SEQ ID NO: 24758 - DNA, 201 bp, Homo sapiens
tccctccccagcatcttttcaggagttccatggactcacctcttcattatccagggttaagctgcagatattgttattaggattccaccttgttctctctytttttttttttttttttttttgatacggagtctcgcttgctcttttgccaggctgaagtgcagtggagcgatcttggctcactgcaatctccgcctcctg

SEQ ID NO: 24759 - DNA, 201 bp, Homo sapiens
tgggaggccgaagcgggcggatcacttaaggtcaggagctcaagaccagcctggccaacttgaaactccatctctactaaaatataaaaattagccgagcrtagtagtgggtgcctctttttttttttttttttttttgagatagtttcactcttgttgcccaggctgtagtgtaatggcgcgatctcagctcactgcaac

SEQ ID NO: 24760 - DNA, 201 bp, Homo sapiens
tccccagcatcttttcaggagttccatggactcacctcttcattatccagggttaagctgcagatattgttattaggattccaccttgttctctctttttytttttttttttttttttgatacggagtctcgcttgctcttttgccaggctgaagtgcagtggagcgatcttggctcactgcaatctccgcctcctgggtt

SEQ ID NO: 24761 - DNA, 201 bp, Homo sapiens
tctcaggaaaaaataaaaaagaggtaggaattagatatcgtgccagaaaatgctggctctatcagcaggtgagtggtctcaacttggctatcttacaaatmccttgtgagttagctacaatcagatgcacttgaacctggaatcctatctgggaggcaatcttaaaagaatttgactcgggatgggcaaggtggctcatgc

SEQ ID NO: 24762 - DNA, 201 bp, Homo sapiens
ctggcaggcagatcacctgaggttgggagttcgagaccagcctgaccaacgtagagaaaccctgtctgtactaaaaatacaaaattagccaggtatggtgrcacattcctgtaatcccagctactccggaggccgaggcaggagaatcacttgaacccaggaggcggaggttgcagtgagccgacatcacaccattgcatt

SEQ ID NO: 24763 - DNA, 201 bp, Homo sapiens
taccttgtgagttagctacaatcagatgcacttgaacctggaatcctatctgggaggcaatcttaaaagaatttgactcgggatgggcaaggtggctcatrcctgtaatcctggcattttgggagtccaaggcaggtagattgcttgaggccaagaatttaaaaacagcctggccaacacaatgaagccctgtctctactg

SEQ ID NO: 24764 - DNA, 201 bp, Homo sapiens
tagctgggactacaggcgtccgccaccacgcccggctaattttttgtatttttttagtagagacagggtttcaccgtgttagccaggatggtcttgatctsctgacctcgtgatccacccgcctcagcctcctaaagtgctgggaattacaggcatgagccatcacgccccacctgagactgtcttttaaaaaaaaaaaaa

SEQ ID NO: 24765 - DNA, 201 bp, Homo sapiens
cctttcttctcttccctatagatcccaggatgatcagcacatgcttcctttctggacggacctttgttccatatttggatcaaataaggatctgatgggtytagcaatcaatgatagctttctcagtgcctccctagtaaggatcctgtgtgaacaaatagcctctgacacctgtcatctccagagagtggtgtaagtaga

SEQ ID NO: 24766 - DNA, 201 bp, Homo sapiens
cagcctgggcaacagagtgacactctgtctcaaaaaaaaaagatgcaagcattttgaactggaaggagataagagaaaggaacaagtgatccagttctaartgtcatcttttcttttatgaaggcaataaaatcttgagcttatggtaaaatgcaaaattttccccccttctcctttttcagaagcagctttgaaatcctt

SEQ ID NO: 24767 - DNA, 201 bp, Homo sapiens
tgccggagggcatcgatcagcactggctgcattaacgtgttgatttctgtgtttccccaggttgtggggatgttccatccctccgttcagttgtgaagacstctgctctgccctcagctgcaaccagagcctcgtcactctggacctgggtcagaatcccttggggtctagtggagtgaagatgctgtttgaaaccttgac

SEQ ID NO: 24768 - DNA, 201 bp, Homo sapiens
tcactccagcctgggtgacagtgagatcctgtctcaaaaaaaaaaaaaaaacaaaaaaaacaaaggcgcctttttaatcactcactgacacgtgtagaggmgcaaaaagtttgagttgctggttggcccaggaggtcaaggctgcagtgagccaagatggcgttaccacactccagcctgggcaaccgagtgagaccgtgt

SEQ ID NO: 24769 - DNA, 201 bp, Homo sapiens
tgaaacaaatctccttgatgcacaaagtaaccttttcttcccccattgtaccccaggttgaaaatcgatgactttaatgatgaactcaataagctgctggwagaaatagaagaaaaaaacccacaactgattattgatactgagaaacatcatccctgggcagaaaggccttcttctcatgacttcatgatctgaatcccc

SEQ ID NO: 24770 - DNA, 201 bp, Homo sapiens
aatcagtcctcctgcctcaccctcccaaactgctggggtacaggtgtgagccatgacacctggcccttaccagctacttatatcctgaagattattattattttttttttttttgagatagagtctctctctgttgcccaggctggagtgcagtggcgtgatctcggctcactgcaagctccgcctcccgggttcatgcca

SEQ ID NO: 24771 - DNA, 201 bp, Homo sapiens
gaggcaggtggatcacctaaggtcaggagttcgtagaccagcctgtctctactaaagagacaggtgaaaccctgtctctctaaaaccacaaaaatcaggcrggcatggtggcacatagctataatctcatctacttggaggcacgagaactgcttgaatccaggaggcagaggctacagtgagccgagatcatgccacagc

SEQ ID NO: 24772 - DNA, 201 bp, Homo sapiens
cgcgatctcggctcactgcaacctccgcctcctgggttcaagcgattctcctgccccagcctcctgagtagctgggattacaggtgcctgtcaccacgccyagctaacttctgtatatttagtagagacacggttttaccatgttaggttggtcttgaactccttgacctcaggtgatccatccacctcggcctcccaaag

SEQ ID NO: 24773 - DNA, 201 bp, Homo sapiens
gggtgaggcagagaattgcttgaacctgggaggcggaagttgcagtgagctgagattgtgccactgtactccagcctgggtgtcagagcgagactgtctcaaaaaaaaaaaaaaaaaagtttctatacattcataaagtttcaagatttgggggtgtgttttcacttctccatcgtcatggactccaatctgccatctatt

SEQ ID NO: 24774 - DNA, 201 bp, Homo sapiens
agcgattctcctgccccagcctcctgagtagctgggattacaggtgcctgtcaccacgcccagctaacttctgtatatttagtagagacacggttttaccrtgttaggttggtcttgaactccttgacctcaggtgatccatccacctcggcctcccaaagtgctgggattacaggcgtgaaccaccgtgcccggcctgag

SEQ ID NO: 24775 - DNA, 201 bp, Homo sapiens
attttgtattttaatagagatggggtttcactatgttggccaggctggtcttgaactcctgaccacgtgatcaacccgcctcagcctcccaatgtgctggrattacaggtgtgagccgccatgcccagctacacttttttttgaaacggggtctcgttttcttgctcaggctggagtacaatggggcaatcacagctcact

SEQ ID NO: 24776 - DNA, 201 bp, Homo sapiens
tgggacttggacatctttaggggaggccattcttctgtccaccacaccaccccatgattccatttccatgtcaccactgtctctaagtgtgtctaacccayggctcaagagtcaaaggtgcatcacagcagtgagaactcacaggttcgggtttgctttcttcctgtggttgatttctaggctttggaactgcgacataac

SEQ ID NO: 24777 - DNA, 201 bp, Homo sapiens
ctatctcctgttcctttgaagaaccccatctctctccaatcttttcctccactattcttaatgtgcccactgtctcctggagaatgccaacctcccttccrtaagaatagagggaagaacgaacgttgcagagaattagaactcagtttgtagaaagttaggagcacagcgcagagagtttttgtttttgtttttgttttg

SEQ ID NO: 24778 - DNA, 201 bp, Homo sapiens
attgcaggatgacattccacacatcctagcccaagcacggaaaatcttgttcgtgattgacggctttgatgagctgggagccgcacctggggcgctgatcsaggacatctgcggggactgggagaagaagaagccggtgcccgtcctcctggggagtttgctgaacagggtgatgttacccaaggccgccctgctggtcac

SEQ ID NO: 24779 - DNA, 201 bp, Homo sapiens
gctgaggtgggaggatcacttgagcctgggaggaagaagttacagcgaattgagatcacgtcacctcactccagcctgggtgacagtgagatcctgtctcaaaaaaaaaaaaaaaacaaaaaaaacaaaggcgcctttttaatcactcactgacacgtgtagaggagcaaaaagtttgagttgctggttggcccaggaggt

SEQ ID NO: 24780 - DNA, 201 bp, Homo sapiens
ggaactgagggttccttctttttttagactgtatagggtaacttcctgatgttgccatggtatttataaactgtcatggccctagtgggagagtcttttarcatgctaatgcattataattagtgtataatgagcactgaggacaaccagaggtcacctttgtcaccatcttggttttggtaggtttgggctatctttatc

SEQ ID NO: 24781 - DNA, 201 bp, Homo sapiens
cgagtagctgggattacaggcaccacctaattagcccgccaccacgcccggctaatttttgtatttttagtagagacggggtttcaccatcttggctaggmtggtcttgaactcctgacctcgtgatccacccgcctcggcctcccagagtgctgggattacaggcgtgagccaccgcacctggcctaaaactgatttttt

SEQ ID NO: 24782 - DNA, 201 bp, Homo sapiens
acaggcgtgagccaccgcgcctggccagaatcccagttttttaacacatctaatgctttaggaatagtaaatggaaacatcatttccccttctttcgaagyacttctaccttgatgagatgtatgtattggagtacaatatttgacctagccaagaatttcacaaaagaagcccaaaatatgattttcacgtttactggac

SEQ ID NO: 24783 - DNA, 201 bp, Homo sapiens
tagctatagctcgacccttaacagctaatcaggtaaactcttcaactcagttttgaacgtaacatagtatactacagactttttgtttttgtcctcagagstaaagagaaacaatggctatatggcatactatgaggattaattttatatgtctacttgactgggccatagggtgcccaatatatggtcaaacattatttt

SEQ ID NO: 24784 - DNA, 201 bp, Homo sapiens
ttgcttgaaccagggaatcaggttgcagtgagctgagatcatgccactgcattgcaatctggcgacagagcgagattctgtctcaaaaaaaaaaaaaaaaattagagcatgcctataatctgagctactcaggaggctgagacacgagaatcacttgaacccagggcggcggaggtgcagtgagcagcgatcacaccactg

SEQ ID NO: 24785 - DNA, 201 bp, Homo sapiens
ctctactaaaaatacctgggcaaagtagagcatgcctggccgggcgcagtggctcatgcctgtaatcccagcactttgggaggctgagacaggtggatcakgaggtcaggagatcgagaccatcctggccaacatggtgaaaccctgtctctactaaaaatacaagaattaactgggcatggtggcacatgcctgtaattc

SEQ ID NO: 24786 - DNA, 201 bp, Homo sapiens
ttgtgatctgcccacctcggcctcccaaagtgctgggattacaggtgtgagccactgcgcccggcctatttcttcttctctttgtttagttattatctatwactctcattcctatgaacataacttgtttctccccacttaatttttatcatacataattgtagacagtgggcactgtcttcaattatagtgaatttagca

SEQ ID NO: 24787 - DNA, 201 bp, Homo sapiens
agcttgcacgtgggaggcggaggttgcagtgagccgagatcctgtcactgcactccagcctgggcgacaaagcgagactctcaaaaaaaaaaaaaaaaaargcacgtaataaatcaaatatgcattatgtaatcacaaaatccagcttaacaactaaataataatttaaaagatattaaaaacttaatatggaagaaaaat

SEQ ID NO: 24788 - DNA, 201 bp, Homo sapiens
ttgcatttctcaaaacacttttttttcttttgctgtatttataccaagtcactttttgtttgtttgttggttggttggttggttggttggttggttggttkgttggagtcggaatctcactctgttgccgaggctggagtgcagtagagtgatcttggctcactgcaacctctgcctcccaggttcaagcgattctcctgc

SEQ ID NO: 24789 - DNA, 201 bp, Homo sapiens
tgtatttttagtagagacagggtttcaccatgttagccagactggtcttgaactcctgaccttgtgatccacccgccttggcctcccaaagtgctgggatwacaggcgtgagccaccgcgcctggccttctttttctttttcttagagacagggtctcactctgttacccaggctgcagtgcagtggcacaatcatagttc

SEQ ID NO: 24790 - DNA, 201 bp, Homo sapiens
ctgggtgacagagcaactaactaactaactaactaaaactacagttagtttatatatagtttttagttaaaactatagttagtttgagccaggcgcggtgsctcacgcctgtaatcccagcactttgggaggccgaggcgggcggatcacgagaataaggagatcgagaccatcctggctaacaaggtgaaaccccgtctc

SEQ ID NO: 24791 - DNA, 201 bp, Homo sapiens
gagaattgcttgaacccaggaggcagaggtggcagtgaattgagatcatgccactacacttcagcccgggtgatagaacgagactctgtctcaaaataacaataataataataataataataataataatagctggacatggtggtgcacacctgtagtcccagctacgtggaaggctgaagcaggagaattgcttgaacc

SEQ ID NO: 24792 - DNA, 201 bp, Homo sapiens
ggaactatgcacagaactttacagaacaggggcgatgctttaactgaaggctgactactgaccagagaatggaattctgagagggctcaaggaataaaagraaactaggcagggaaagggaaggcgcccatctgaagcaaacttcagcggccatcaggatatcttgtggtggtcacaagttgtaggctctgtttttggaag

SEQ ID NO: 24793 - DNA, 201 bp, Homo sapiens
ggagaattgcttgaacccaggaggcagaggtggcagtgaattgagatcatgccactacacttcagcccgggtgatagaacgagactctgtctcaaaataacaataataataataataataataataataatagctggacatggtggtgcacacctgtagtcccagctacgtggaaggctgaagcaggagaattgcttgaac

SEQ ID NO: 24794 - DNA, 201 bp, Homo sapiens
ttgggacagggtcttgctgtgttgcccaggctggtttctaactcctgggctcaagcgatccactggcctcagcctcctgaagtgctgggattacaggagtsagccactgcaccaggcccatttctctaccatttctgatctctctctagaaacacttggataactgcacagctcctttcataagaaatatattttagggcc

SEQ ID NO: 24795 - DNA, 201 bp, Homo sapiens
gggagaattgcttgaacccaggaggcagaggtggcagtgaattgagatcatgccactacacttcagcccgggtgatagaacgagactctgtctcaaaataacaataataataataataataataataataatagctggacatggtggtgcacacctgtagtcccagctacgtggaaggctgaagcaggagaattgcttgaa

SEQ ID NO: 24796 - DNA, 201 bp, Homo sapiens
cacggcactccagcctggccgacagactctgtctcaaaaaaaaaaaaagatttatagttttggctgggcgtggtggctcatgcctataatcccagcatttkgggaggccaaggcaggtggataactttaggccaggagtttgagaccagccgggctgacataacaaaacctgatctctactaaaagtacaaaacttaggct

SEQ ID NO: 24797 - DNA, 201 bp, Homo sapiens
atgatacctttgagagatgtcttacatttgtcttttctttcagcaaaatgtgatgccagtccctgaaatgtgtagcaatttaattatgggtagcattcttytttccctgtacttactatagtattaacttactactaatgctaagaagtttataatttttgataattcagatttggattagattaagatttatgtctatgc

SEQ ID NO: 24798 - DNA, 201 bp, Homo sapiens
gaaagaaagagccagttcacagtgcgcctttgtattcggcgggaaacccggccgaagagggagctggaaaggactccggaatccggccgtaattccagccmatcagggagtagagttgcggggcggggttggggcggggcagtctcgcgggagatagtttcgcgggttcgggaggcgagtctccggtttccgcccagtctc

SEQ ID NO: 24799 - DNA, 201 bp, Homo sapiens
tgtcaaaaaagattgtaggtaccttgtttaaagaaaatatataagctagtttcaagaattccaaaatattttttaaaagcagctctgtacatgtcgataarttatttgctcattgtaattttttgaatctgtttgtcaaagcaaatgtagacgggctcgaactcctgacctcaaatgatccacccgcctcagtctcccaaa

SEQ ID NO: 24800 - DNA, 201 bp, Homo sapiens
atctgtttgtcaaagcaaatgtagacgggctcgaactcctgacctcaaatgatccacccgcctcagtctcccaaatgctggtattacaggcatgagccacygctcatggcctgttatcatttttaattgaaaattttactgagataattgtagattcacttgccattataagaaataattcagagatatcacttgtatact

SEQ ID NO: 24801 - DNA, 201 bp, Homo sapiens
actacaggtgcatgccaccatgcctggctaatttttgtgctttttcgtgtataaagatgagatttcgccatgttgcccaggctggtctcaaactcctgggmtcaagagatctgtccacctcagcctcctaaagcgctgagattacaggcatgagccaccacgtccagcctagagatatttatactttaatagctgcctgca

SEQ ID NO: 24802 - DNA, 201 bp, Homo sapiens
acttgccattataagaaataattcagagatatcacttgtatacttagcccagtgtcccccaaaggtaaaattttgcaaaattatagtctaatgtaacagcrtgaatattgacattaatacaatccactgagtttattcagatttccccagttttacttgtattcaattgtgtgtttgtgtattaagttcgatataactagt

SEQ ID NO: 24803 - DNA, 201 bp, Homo sapiens
tccagaccccaagagcaggttactggatcttgcacaggaaataattcaagggaagtcacacagcacagagaaaaagcaagttcatacaatgttactgagtwagttatcgccagaaagcaggaggaggaacacgccatccttgttagtgtctctatttataagaaacttatgagaagctataattaaacttggaacatgcag

SEQ ID NO: 24804 - DNA, 201 bp, Homo sapiens
gtgacagagctagaccctgtctgaaaaaaaaaaaaaatgttagtagcagcagagcacagtggctcatgcctgtaatcccaacactatgggagtctgaggcrggaggatctcttgagcttaggagttcaagaccagcctgacaacatagtaagactccatctctacaaataatcattaaaaaaattagccgggcgtagtggc

SEQ ID NO: 24805 - DNA, 201 bp, Homo sapiens
ttggaacatgcagatgtgctcactaaaggtaggggctattggtgttatagatgaccattaatctttcaacctaagcctgctcattaatggcatctttaatraagtgggctacactcttaggacatctggacattctgcaggattggtgggagatgttctgtatggccaccaatattctgtaattataattggtggtcagct

SEQ ID NO: 24806 - DNA, 201 bp, Homo sapiens
tttcttttttttctttttcttttttattttttgaggcagagttttgctctgttgcccaggctagagtgcagtggcgcgatctcggctcactgcaacctccrcctcctgggttcaagcgattctcctgcctcagcctccctagtagcttgtttcttagagacagtgtgagtgaaactcattaagtaaagtcaatacagcaca

SEQ ID NO: 24807 - DNA, 201 bp, Homo sapiens
ttcacttcttactaaatgcagcatagcatactacatcttttgagtgtgtaaaaaataaagtagtcatgtacaaacctaaaatcacagaataatcatgtaayggtgctatattttatttttactttagattcctaatacatttttattgtatctttataaggttagtttgggagaatagcactatcatcatctatattagtt

SEQ ID NO: 24808 - DNA, 201 bp, Homo sapiens
tattttctcccaatttgtgggtcatctttccactttcctaaaagtgtcatttcaagcaaaaattttaattttgatggagttgtgtgtgtgtgtgtgtgtgkatgtgtatgtgtgtctttggtgtcatagctgagaaattattgtcaaatccaggatcatgaaagatttacatctatattttcttttaagagttatagtttt

SEQ ID NO: 24809 - DNA, 201 bp, Homo sapiens
cgggaaacccggccgaagagggagctggaaaggactccggaatccggccgtaattccagccaatcagggagtagagttgcggggcggggttggggcggggmagtctcgcgggagatagtttcgcgggttcgggaggcgagtctccggtttccgcccagtctctggggacgcggtggcggggtctgaatcgcctggcttcca

SEQ ID NO: 24810 - DNA, 201 bp, Homo sapiens
ttttaaatgataaagacaggttaataaaatgtataatattatgttgctatatccaaaaaaaggccttctttgattacactatcaaaagttacctctccatytacatccccattactatctcattaacctgttttattcatagcacttactaccatctaaaatgactttatttctttatatttttgtttgctacctgtcttt

SEQ ID NO: 24811 - DNA, 201 bp, Homo sapiens
gagtgagttaccatgagatctggttgtttaaaagtgtgtagcacctctcacctcactctattccttctgctctggccatgtaagatgtgcctgcttccccytcaccttctgccatgattgtaagtttcctgaggcttccctagccatgcttcccatgcagcctgtggaactgtgagccaattaaacctcttttctttgtaa

SEQ ID NO: 24812 - DNA, 201 bp, Homo sapiens
tgtcaaagtataatccccagtgttagggcctggtgggagctgattggatcatgggggtgtatttcccctttggtgctgttctcatgatagtgagtgagttrccatgagatctggttgtttaaaagtgtgtagcacctctcacctcactctattccttctgctctggccatgtaagatgtgcctgcttccccttcaccttct

SEQ ID NO: 24813 - DNA, 201 bp, Homo sapiens
ggcttgagtctgtgtccctgcccaaatctgatgtcaaagtataatccccagtgttagggcctggtgggagctgattggatcatgggggtgtatttcccctytggtgctgttctcatgatagtgagtgagttaccatgagatctggttgtttaaaagtgtgtagcacctctcacctcactctattccttctgctctggccat

SEQ ID NO: 24814 - DNA, 201 bp, Homo sapiens
caaagtgctgggattacaggcatgagccaccgtgcccagcccgaagttactaacttgttttggattttacgggctcacaggcagaagggacttgccttgtytcagatgagactttgttctttgggcttttgagttaatgctggaatgagttagaactttgggggaactgttgggaaggcagattgtattttgaaatgtgag

SEQ ID NO: 24815 - DNA, 201 bp, Homo sapiens
ccaacatggcgaaaccccatctctactaactacaggcaggtgcctgtaatcccagctactcaggaggctgaggcaggagaatagcttaaatccaggaggckgaggttgtggtgagctgagatcatgccattgcactccagcctgagcagcaagagtgaaactctgtctcaaaaaaaaaaaaaaaaaaaaaaaaaagattta

SEQ ID NO: 24816 - DNA, 201 bp, Homo sapiens
actccatctctacaaataatcattaaaaaaattagccgggcgtagtggcacctacctgtagtcccagctactggggaggctgagatgggaggatcacctgrgcctgggaggtcaaggctgcagtgagctgtgatcgccattgtactccaaactgggtgacaagagtgagaccatgcctcaaaaataataataataaatgta

SEQ ID NO: 24817 - DNA, 201 bp, Homo sapiens
cactaatcccttttccatttctaaaatgtgatttcaaaaatgttacatacttggctgggggcggtggctcatgcctgtaatcccagcactttggatatackgtctctactaaaaatacaaaaattagctgggagtggttgtgcacacctgtaatcccaggtgcttgggaagctgaggcaggagaattgcttgaacccagga

SEQ ID NO: 24818 - DNA, 201 bp, Homo sapiens
ctcatccccaactattgacaaccactaatcccttttccatttctaaaatgtgatttcaaaaatgttacatacttggctgggggcggtggctcatgcctgtwatcccagcactttggatatacggtctctactaaaaatacaaaaattagctgggagtggttgtgcacacctgtaatcccaggtgcttgggaagctgaggca

SEQ ID NO: 24819 - DNA, 201 bp, Homo sapiens
attttgggcctgtttgattttttgggagacaccacccagcagaaacacaccgcacttacatgcaacccctccattgcacagtttctaaatgcccccccccytttttttccattctctgatcctaaaaaaagaaatccagtggcacaatcacggatctctgcagccttgatctcttagcctcaagtgattctcctgcctcag

SEQ ID NO: 24820 - DNA, 201 bp, Homo sapiens
taagttcgatataactagtcaatatactgaacagttctaacatcacaagtatccttcaggtagcccttttgtatccacatccacttccttctcatccccarctattgacaaccactaatcccttttccatttctaaaatgtgatttcaaaaatgttacatacttggctgggggcggtggctcatgcctgtaatcccagcac

SEQ ID NO: 24821 - DNA, 201 bp, Homo sapiens
gaaaccccgtctctactaaaaatacctgggcaaagtagagcatgcctggccgggcgcagtggctcatgcctgtaatcccagcactttgggaggctgagacrggtggatcaggaggtcaggagatcgagaccatcctggccaacatggtgaaaccctgtctctactaaaaatacaagaattaactgggcatggtggcacatg

SEQ ID NO: 24822 - DNA, 201 bp, Homo sapiens
aataagaataatatttgagaaactcacacaatatgaaaagctattctattcagatgtgcacactactgtagcctatttctattttgtattggttagtatgyatcaggtcatctcataggttggggctcttctgagtcttgcatttctcaaaacacttttttttcttttgctgtatttataccaagtcactttttgtttgtt

SEQ ID NO: 24823 - DNA, 201 bp, Homo sapiens
ctaatacattgaacatctcttcatgtgcttattggccatgtgtatatcttctttgtagaaatacctattcatatttgttgtcccttttaaaattgggttgkctttttattgctgagttgtaagtgttctttatattttctggatactggacttttattaagtgtataatttgtaaatattttctcccaatttgtgggtcat

SEQ ID NO: 24824 - DNA, 201 bp, Homo sapiens
tcttttgctgtatttataccaagtcactttttgtttgtttgttggttggttggttggttggttggttggttggttggttggagtcggaatctcactctgtygccgaggctggagtgcagtagagtgatcttggctcactgcaacctctgcctcccaggttcaagcgattctcctgcctcagcctcccaagtagctgggacg

SEQ ID NO: 24825 - DNA, 201 bp, Homo sapiens
ggtctgtatgtctgtccttataccagcaccacactgtcttgattaatgtagctttgtagtaagttttgaaatgggtaagtgtgaaaaattccaacttaatytcatttttttcaagatcattctggctattttgggtcccttgcttttccatatgtattttaagatcagcttttccatgaacatggaatatttttccattta

SEQ ID NO: 24826 - DNA, 201 bp, Homo sapiens
agagaaatgtagggtagaataaggagtaaagaaagggtaaatagaaattaatactgacaattaatttttaaaaatcctatacaatttataatatatgaaaragtaaaacatatcagtagtacaagggcaagaaatggtaaatggagttaagctatcataagtgttttatttagggagtatcacaaaagtattaaagtagaa

SEQ ID NO: 24827 - DNA, 201 bp, Homo sapiens
tgcacgtgggaggcggaggttgcagtgagccgagatcctgtcactgcactccagcctgggcgacaaagcgagactctcaaaaaaaaaaaaaaaaaaagcaygtaataaatcaaatatgcattatgtaatcacaaaatccagcttaacaactaaataataatttaaaagatattaaaaacttaatatggaagaaaaatgaaa

SEQ ID NO: 24828 - DNA, 201 bp, Homo sapiens
tttctcaaaacacttttttttcttttgctgtatttataccaagtcactttttgtttgtttgttggttggttggttggttggttggttggttggttggttgkagtcggaatctcactctgttgccgaggctggagtgcagtagagtgatcttggctcactgcaacctctgcctcccaggttcaagcgattctcctgcctcag

SEQ ID NO: 24829 - DNA, 201 bp, Homo sapiens
ccacatccacttccttctcatccccaactattgacaaccactaatcccttttccatttctaaaatgtgatttcaaaaatgttacatacttggctgggggcrgtggctcatgcctgtaatcccagcactttggatatacggtctctactaaaaatacaaaaattagctgggagtggttgtgcacacctgtaatcccaggtgc

SEQ ID NO: 24830 - DNA, 201 bp, Homo sapiens
agaagaatagcttgagcccgggagacagaggttgcagtgggccaaaatcatgccacggcactccagcctggccgacagactctgtctcaaaaaaaaaaaaagatttatagttttggctgggcgtggtggctcatgcctataatcccagcattttgggaggccaaggcaggtggataactttaggccaggagtttgagacca

SEQ ID NO: 24831 - DNA, 201 bp, Homo sapiens
tttacatgataacctaaaattaattgccagtttgttttaatttactggtcaagtctatcaaatgattgaatcagcatgtttaagtggatatatctcatttrtgtccagatcattttagtatattcatgactcctcactttaaaattcaaatgataataggtacagttagtcctccatatctgtggattcaaccaagtaaaa

SEQ ID NO: 24832 - DNA, 201 bp, Homo sapiens
tttcaaaaatgctgatttttaaaatttctatcatttcttatacacttattagctcacatttttctgtaatgagtttacccttatcaagtgggactctttgkttagctgctcctctaagctaattttcttgtattctcaaagcagtttctccatactatcatttcaatacctcttgctgttctagtttgctgttttgagtat

SEQ ID NO: 24833 - DNA, 201 bp, Homo sapiens
gacgctagggacgcctgtatatggcttagattcagtgtgttagtgaaacctgctacacagtagcctgtttagagttccccatttttaaaaatactctgctyttttaaaattcattatacagccttatttctcagtactgactaaaatgtcttatttttatatatcgaagctttctatttattttttaaaccaatgtataca

SEQ ID NO: 24834 - DNA, 201 bp, Homo sapiens
atttcaaaaatgctgatttttaaaatttctatcatttcttatacacttattagctcacatttttctgtaatgagtttacccttatcaagtgggactctttkgttagctgctcctctaagctaattttcttgtattctcaaagcagtttctccatactatcatttcaatacctcttgctgttctagtttgctgttttgagta

SEQ ID NO: 24835 - DNA, 201 bp, Homo sapiens
ctttactcagattgagatattagttaaacttaagggcctgaaacaaggaaaatggggtttgcttttttctggttgtgcagagagtgtatgaataaaaagawctcacaaagttcaagtgaaagactgattaaaagaaattcatcatccaaatatcttctcagtgttaagcaagcacatgaagttagctatagctcgaccctt

SEQ ID NO: 24836 - DNA, 201 bp, Homo sapiens
gtccatacagctctgatcttttcttcttttatgctgcttgtttttccaaggcttttagtgatgcaaacttatcattactttaacaattccagctttccttytatgtcttggttttacacgacaagaagcccagaaactgaacttgcttactcagctcccgaggttgaaggtggcaagaaggtggtaagaatcctagacagg

SEQ ID NO: 24837 - DNA, 201 bp, Homo sapiens
ctcccgagagacagaggttgcagtgagccgagatcgcgccattgcactccagcccgggggaccagagcgagtcttcctctcaaaaaaaaaaaaaaaaaaaattgagatgatttaaagtgtacaggaggatgtgaataggttagatacaagcacaataccattttgtatcaaagacttgagtattcataaattttggcatct

SEQ ID NO: 24838 - DNA, 201 bp, Homo sapiens
tcggctcactgcaagctccgcctcccaggttcacgccattctcctgcctcagcctcccaagtagctgggactacaggcgcccaccaccacgcctggctaaytttttgtatttttagtagagacggggtttcaccgtgttagccaggatggtctcgatctcctgacctcgtgatccgcccgtctcggcctcccaaagtgctg

SEQ ID NO: 24839 - DNA, 201 bp, Homo sapiens
ttctggtaaattgcagatagtgaatcttttgtcttatactatcaaataggtattgactattccagctttcttatttgttgaggaagatggcagaaatcccrttttacagagggatagactttgaaggataatacccaaagctgcatagctgtggctggtataggccccaaacctgatgtttcttctctaaatctactgcct

SEQ ID NO: 24840 - DNA, 201 bp, Homo sapiens
gaaactcattaagtaaagtcaatacagcacaagtttcataaaatggtaaagaaatagaaataaaagtaaaggatgaaattcttaagaactttgtcaggccrggcgtggtggctcatgcctgtaatcccagcactttgggaggccgaggtgggtggatcacctgaggtcaggagtttgagaccagcctggccaacatggcaa

SEQ ID NO: 24841 - DNA, 201 bp, Homo sapiens
ggtggaggctacagtgagcaatgatggcaccacactccaacctgggcgacacagtgagactctgtctcaaaacaaaacaaaacaaaacaaaacaaaacaaagaagatttggtagaattctcctgtgggagtttggagaaagaagtagaacattattattgtttttttcctgtcatatttctaatggaaacaggatgattac

SEQ ID NO: 24842 - DNA, 201 bp, Homo sapiens
gtgtcttgctctgtctcccaggctggagtgcaatggcgtgatctcagctcactgcaacctccgcctcccgggttcaagcgattctcctgcctcagcctccygagtagctgggactacaggcgcctgccaccacgcccagctaatttttatacttttaatagagacagggtttcaccatattggccaggatggtctcaatct

SEQ ID NO: 24843 - DNA, 201 bp, Homo sapiens
tccattctctgatcctaaaaaaagaaatccagtggcacaatcacggatctctgcagccttgatctcttagcctcaagtgattctcctgcctcagcttcctragtagctgggaccacaggtgcttgccaccatgcccagctatttttttttctttgtttttttgtaaagatgtgtctcactatcttgcccaggctgatattg

SEQ ID NO: 24844 - DNA, 201 bp, Homo sapiens
aggtggaggctacagtgagcaatgatggcaccacactccaacctgggcgacacagtgagactctgtctcaaaacaaaacaaaacaaaacaaaacaaaacaaagaagatttggtagaattctcctgtgggagtttggagaaagaagtagaacattattattgtttttttcctgtcatatttctaatggaaacaggatgatta

SEQ ID NO: 24845 - DNA, 201 bp, Homo sapiens
aaattagccaggcatggtggcacgtgcctgtagtcccagctactcaagaggctgaggcaggagaatcctttgaacccgggaggcagaggttgcagtgagcygatattgcagcactgcactccagcctgggtgacagatcaaaactctgtctcagaaaaaaaaaaaaaaaaaaaaagaatttcctagaattagaatcgcagg

SEQ ID NO: 24846 - DNA, 201 bp, Homo sapiens
tcattttgggcctgtttgattttttgggagacaccacccagcagaaacacaccgcacttacatgcaacccctccattgcacagtttctaaatgcccccccscctttttttccattctctgatcctaaaaaaagaaatccagtggcacaatcacggatctctgcagccttgatctcttagcctcaagtgattctcctgcctc

SEQ ID NO: 24847 - DNA, 201 bp, Homo sapiens
caaatttgggacatactttttctgctgtaaaaatattttcctaaggccaggcgcagtggctcacgcctgtaatcctagcactttgggagacggaggcggcrgatcacttgaggccaggagttcaagaccagtctggccaacatggtgaaacccagtctctactaaaaatagaaaaaattagccaggcatggtggcacgtgc

SEQ ID NO: 24848 - DNA, 201 bp, Homo sapiens
cttgaacccaggaggcggaggttgcagtgagccgagatcacatcattccactccagcctgggtgccaagagcaaaaaactccatcttgaaaaataaagaaytttgtctccagtatcattcttgttctaggactgagaaacagttcattcttcattttcgtctactaaaatttaagttctttgattttcttctttaggtctt

SEQ ID NO: 24849 - DNA, 201 bp, Homo sapiens
tcagcctcccgggttcaagcaattctcctgcctcagcctcccgagtagttggaactataggcgtgagccaccatgccctgctaatttttgtatttttagtrcagatggggtttcactatgttggccaggctggtctcgaactcctgaccttgtgatctgcccacctcggcctcccaaagtgctgggattacaggtgtgagc

SEQ ID NO: 24850 - DNA, 201 bp, Homo sapiens
cctgcctcagcctcccaagtagctgggattacaggcatgtgccaccatgcccagctaatttttgcatttttagtacagcagggtttcaccatgttggtcargctggtctcaaactcctgacctcaggagatccgtcagccttggcctcccaaagtgttgggattacaggcgtgagccacagcacccagccagaatttaaac

SEQ ID NO: 24851 - DNA, 201 bp, Homo sapiens
gggttcaatcaatcctcctgcctcagcctcccaagtagctgggattacaggcatgtgccaccatgcccagctaatttttgcatttttagtacagcagggtktcaccatgttggtcaggctggtctcaaactcctgacctcaggagatccgtcagccttggcctcccaaagtgttgggattacaggcgtgagccacagcacc

SEQ ID NO: 24852 - DNA, 201 bp, Homo sapiens
ctaaaatgactttatttctttatatttttgtttgctacctgtcttttacaccagaatttaatttttaagctttttttgtttgtttgtttgtttgtttgttttgagatggagtcttgctctgttgcccagactggagtgcagtggtgcgatctcagctcactgcaacctctgcctcctgggttcaatcaatcctcctgcctc

SEQ ID NO: 24853 - DNA, 201 bp, Homo sapiens
tctaaaatgactttatttctttatatttttgtttgctacctgtcttttacaccagaatttaatttttaagctttttttgtttgtttgtttgtttgtttgttttgagatggagtcttgctctgttgcccagactggagtgcagtggtgcgatctcagctcactgcaacctctgcctcctgggttcaatcaatcctcctgcct

SEQ ID NO: 24854 - DNA, 201 bp, Homo sapiens
atctaaaatgactttatttctttatatttttgtttgctacctgtcttttacaccagaatttaatttttaagctttttttgtttgtttgtttgtttgtttgttttgagatggagtcttgctctgttgcccagactggagtgcagtggtgcgatctcagctcactgcaacctctgcctcctgggttcaatcaatcctcctgcc

SEQ ID NO: 24855 - DNA, 201 bp, Homo sapiens
tggcggaaatgattggcggaaagaaagagccagttcacagtgcgcctttgtattcggcgggaaacccggccgaagagggagctggaaaggactccggaatscggccgtaattccagccaatcagggagtagagttgcggggcggggttggggcggggcagtctcgcgggagatagtttcgcgggttcgggaggcgagtctc

SEQ ID NO: 24856 - DNA, 201 bp, Homo sapiens
aaacaagatggggtcagttaagttagatctctttcactgtctcaggcataattttgcacaggcggtttcagtataatcatttcagtacaagacaagatttwaaaaaagaaaactaatgctaagcatttttcaagaaacatactgtaggccgggtgcagtggctcacgcctgtaattccagcaccttgggaggctgaggcgg

SEQ ID NO: 24857 - DNA, 201 bp, Homo sapiens
gcgaattcttcctgcctgatggccttcaaaatgggacatcagctctttttcctgcctttggactcaaaccattggctcttcctgggtcttgagcctgctgrcctttggactggagctacactatcagctctcttgattttcaggccttcaaacttagactcaaactacattattggctcccctgggtctcccagatcccag

SEQ ID NO: 24858 - DNA, 201 bp, Homo sapiens
ggcgggcggatcacgaggtcaggagatcgagaccatcctggctaacatggtgaaaccccgtctctactaaaaacacaaaaaaattagccgggtgtggtggygggcacctgtagtcccagctactcgggaggctgaggcaggagaatgggtcaacccaggaggcagagcttgcagtgagccaagatcctgccactgcactcc

SEQ ID NO: 24859 - DNA, 201 bp, Homo sapiens
atcgagaccatcctggctaacatggtgaaaccccgtctctactaaaaacacaaaaaaattagccgggtgtggtggtgggcacctgtagtcccagctactcrggaggctgaggcaggagaatgggtcaacccaggaggcagagcttgcagtgagccaagatcctgccactgcactccagcctgggtgacagagcgagactct

SEQ ID NO: 24860 - DNA, 201 bp, Homo sapiens
ttgggtaatgtgaatattaccctaaagaaagctgcatctatgtggaactgttaccgggaatgggtcccaatctagaccccaagagagggttcttggacctyacgcaagaaagaattaggggcaaatccataaagtgaaagcaagtttattgggaaagtaaaggaataaagaatggctactccataggtagagtcacagtat

SEQ ID NO: 24861 - DNA, 201 bp, Homo sapiens
agtatgggctgcttaactgagtatactcagttatttcttgattatatgctaaacaaggggtggattattcatcagttttctggaaaaggggcaggcatttstcggaactgagggttccttctttttttagactgtatagggtaacttcctgatgttgccatggtatttataaactgtcatggccctagtgggagagtcttt

SEQ ID NO: 24862 - DNA, 201 bp, Homo sapiens
ccagtagcagcaggcagctattcacacccaaatttcaccttaaaaagaatggcttcaaaattgacctcccccatgggaaatattgcaggacttaacacagrattgtttttctcttcatttctctacgatttctttctttctttttttttccttttttccgaggtggagtttctctctttttgcccaggctggagtgcactg

SEQ ID NO: 24863 - DNA, 201 bp, Homo sapiens
gtgagccaagatcgcgccattgcactcctgcctgggcaataagggcgaaactccatctcaaaaaaaagaaagaaatccttagactataagtttgttatatratctgcatgtaaaacaaggtcctatatgactcaaataatgtgcagggttccctttaaaaagttcagcaactactttcctttttttttttttgagatggag

SEQ ID NO: 24864 - DNA, 201 bp, Homo sapiens
ggaaattggtgcaaatgagaaatcttggaaatctgtaagtatatagatataaaagttattctttccagtttgattcttttatgatgtagattttaatatcmgtcaatttaggaaactctgtggctctgaattatagttataattctagttttactattacagtgaaagaagagaagaggctgttcattattatattggaag

SEQ ID NO: 24865 - DNA, 201 bp, Homo sapiens
gcgcccggcctatttcttcttctctttgtttagttattatctattactctcattcctatgaacataacttgtttctccccacttaatttttatcatacatrattgtagacagtgggcactgtcttcaattatagtgaatttagcagtaaattcacattagaccaacttgtatagctttaaaaaatatatttatgtctaggt

SEQ ID NO: 24866 - DNA, 201 bp, Homo sapiens
aggaggctgtgagagagaggatttgggaaattggtgcaaatgagaaatcttggaaatctgtaagtatatagatataaaagttattctttccagtttgattyttttatgatgtagattttaatatcagtcaatttaggaaactctgtggctctgaattatagttataattctagttttactattacagtgaaagaagagaag

SEQ ID NO: 24867 - DNA, 201 bp, Homo sapiens
gttgttgttttgagatggtgtcttgctctgtctcccaggctggagtgcaatggcgtgatctcagctcactgcaacctccgcctcccgggttcaagcgattytcctgcctcagcctcctgagtagctgggactacaggcgcctgccaccacgcccagctaatttttatacttttaatagagacagggtttcaccatattggc

SEQ ID NO: 24868 - DNA, 201 bp, Homo sapiens
gattacaggtgtgagccactgcgcccggcctatttcttcttctctttgtttagttattatctattactctcattcctatgaacataacttgtttctccccmcttaatttttatcatacataattgtagacagtgggcactgtcttcaattatagtgaatttagcagtaaattcacattagaccaacttgtatagctttaaa

SEQ ID NO: 24869 - DNA, 201 bp, Homo sapiens
gaggtggaggctacagtgagcaatgatggcaccacactccaacctgggcgacacagtgagactctgtctcaaaacaaaacaaaacaaaacaaaacaaaacaaagaagatttggtagaattctcctgtgggagtttggagaaagaagtagaacattattattgtttttttcctgtcatatttctaatggaaacaggatgatt

SEQ ID NO: 24870 - DNA, 201 bp, Homo sapiens
tgagatgtatgtattggagtacaatatttgacctagccaagaatttcacaaaagaagcccaaaatatgattttcacgtttactggactgttcacttttggkgggatcactttcttaagattacttaaagtactaatgcttgatgaaaatcatttgtgttttcacttcattaattggagaaagagctacatgtttttgttgt

SEQ ID NO: 24871 - DNA, 201 bp, Homo sapiens
ggaggtggaggctacagtgagcaatgatggcaccacactccaacctgggcgacacagtgagactctgtctcaaaacaaaacaaaacaaaacaaaacaaaacaaagaagatttggtagaattctcctgtgggagtttggagaaagaagtagaacattattattgtttttttcctgtcatatttctaatggaaacaggatgat

SEQ ID NO: 24872 - DNA, 201 bp, Homo sapiens
tgcactccaacctaggcaacagagcaagaccctgtctcttaaaaggaaaggagagtccagtgtgttctaaggaaaaccccaagagcatcccaccttagaakacaagtgaggaggcctggcatggtgtctcatgcctgtaatcccagcactttgggaggccaaggtgggtggatcacttgaggtcaggagttctagaccagc

SEQ ID NO: 24873 - DNA, 201 bp, Homo sapiens
aggaggtggaggctacagtgagcaatgatggcaccacactccaacctgggcgacacagtgagactctgtctcaaaacaaaacaaaacaaaacaaaacaaaacaaagaagatttggtagaattctcctgtgggagtttggagaaagaagtagaacattattattgtttttttcctgtcatatttctaatggaaacaggatga

SEQ ID NO: 24874 - DNA, 201 bp, Homo sapiens
ctaacaatttgggaggccaaggcaggaggatcgcttgaggccaggagttcgagactagcctggggaacatagtgagaccctgtctctacaaaaaaaaaaaagaaaaaattagctgggtgtggtagtgcacacctgtggtcccagctactcaggaggccaagttgggaggattgcttgagcccaggaggtggaggctacagt

SEQ ID NO: 24875 - DNA, 201 bp, Homo sapiens
tcagctcccgaggttgaaggtggcaagaaggtggtaagaatcctagacaggctaggcctggtggctcacgcctataatcctaacaatttgggaggccaagrcaggaggatcgcttgaggccaggagttcgagactagcctggggaacatagtgagaccctgtctctacaaaaaaaaaaaagaaaaaattagctgggtgtgg

SEQ ID NO: 24876 - DNA, 201 bp, Homo sapiens
gaacctgggagacggaggttgcagtgagctgaggttgtgccattgcactccagcctgggagacagagcaagactccatctcaaaaaaaaaaaaaaaaaaawgtcactaatctctaagatctctgaataactctctcagaattagagtccatacagctctgatcttttcttcttttatgctgcttgtttttccaaggctttt

SEQ ID NO: 24877 - DNA, 201 bp, Homo sapiens
agaggcaggtggatcacctgaagtcaggagtttgagaccagcctggccaacatggcaaaaccccacctctactaaaaatacaaaaaaattagctgggcacrgtggcaggtgcctgtaatctcatctactagggaagctgaagcaggggaatcgcttgaacctgggagacggaggttgcagtgagctgaggttgtgccattg

SEQ ID NO: 24878 - DNA, 201 bp, Homo sapiens
tgggcaataagggcgaaactccatctcaaaaaaaagaaagaaatccttagactataagtttgttatataatctgcatgtaaaacaaggtcctatatgactyaaataatgtgcagggttccctttaaaaagttcagcaactactttcctttttttttttttgagatggagtctcactctgtcacccaggctggagtgggttg

SEQ ID NO: 24879 - DNA, 201 bp, Homo sapiens
agccactgcaccaggcccatttctctaccatttctgatctctctctagaaacacttggataactgcacagctcctttcataagaaatatattttagggccrggtgtggtggcttatgcctgtaatctcagcactttgggaggccgcggcaggtggatcaaccgaggtcaggagttcaagaccagcctggccaagatggtga

SEQ ID NO: 24880 - DNA, 201 bp, Homo sapiens
tctttctttttttttccttttttccgaggtggagtttctctctttttgcccaggctggagtgcactggtgcaatcttggctcaccacaacctctgtctccygggttcaagcaattctcctgcctcagcctcccgagtagctgggattacaggcatgcgccaccacgccaggctaattttgtatttttagtagagacggtgt

SEQ ID NO: 24881 - DNA, 201 bp, Homo sapiens
catctaaaatgactttatttctttatatttttgtttgctacctgtcttttacaccagaatttaatttttaagctttttttgtttgtttgtttgtttgtttgttttgagatggagtcttgctctgttgcccagactggagtgcagtggtgcgatctcagctcactgcaacctctgcctcctgggttcaatcaatcctcctgc

SEQ ID NO: 24882 - DNA, 201 bp, Homo sapiens
gtatgggagaccagagttttattattactcaaatcagtatccacaagcattccgccttcagaatttttaaggacaacatgttgggtgggaggaagccagtragctgggagtgctgattggtcagagctgaaatcatagggaatggaagctgtcttcttgagctgagtcaattcctgggtggggactgcaagatcagatgag

SEQ ID NO: 24883 - DNA, 201 bp, Homo sapiens
agtagagacggggtttcaccatgctggtcaggctggtcttgaactcctgacctcagaggatccacccgccttggccccacaaagtgctgggattccaggcrtgagccacagtgcctggccatgactaactcattccattgagggtcttttctcctgaagttttgtgctatgacttgatatttcaaaagaagggaaatagat

SEQ ID NO: 24884 - DNA, 201 bp, Homo sapiens
ctcccgagtagctgggattacaggcaccacctaattagcccgccaccacgcccggctaatttttgtatttttagtagagacggggtttcaccatcttggcyaggatggtcttgaactcctgacctcgtgatccacccgcctcggcctcccagagtgctgggattacaggcgtgagccaccgcacctggcctaaaactgatt

SEQ ID NO: 24885 - DNA, 201 bp, Homo sapiens
aatccggccgtaattccagccaatcagggagtagagttgcggggcggggttggggcggggcagtctcgcgggagatagtttcgcgggttcgggaggcgagwctccggtttccgcccagtctctggggacgcggtggcggggtctgaatcgcctggcttccagggagttttgggcgggtccccgcacgggagcgtggcaggc

SEQ ID NO: 24886 - DNA, 201 bp, Homo sapiens
ttcaaaatgggacatcagctctttttcctgcctttggactcaaaccattggctcttcctgggtcttgagcctgctggcctttggactggagctacactatyagctctcttgattttcaggccttcaaacttagactcaaactacattattggctcccctgggtctcccagatcccagcagatcttgggaattgccagcctt

SEQ ID NO: 24887 - DNA, 201 bp, Homo sapiens
aaatgctgggattacaggcgtgagccaccacgccaggccagaaacatatttttaaaaatcttgttttagaggaaaaacagagtatttctttttttttttttattagatggattctcactctattgcccaggctggagtacagtggcacaatcttggctcaccgcaacctcagcctcccgggttcaagcaattctcctgcct

SEQ ID NO: 24888 - DNA, 201 bp, Homo sapiens
agttaccttccgttccaggcctcggtttctccatgtgtgaaatgaaagggctggagagaaatctctcactattccccaatctacattcattgtatcccaarccttctaatatctgttcaacgaagtgtaccaaatctcagctattggactgagactcaggggtctatctgacttgaattgaaaatgcaaattactgaagag

SEQ ID NO: 24889 - DNA, 201 bp, Homo sapiens
gaccctggagcccttaactacttatgctaataatgaacatttatacactactttgggcgtgtccaagtttggtgggtcctgaagcttgtgcaatctggggygctctttaagaataaaattattttgtactcataagaattatgagtacaaaattagattcagagcctgggaaagggtcctggcctagctttacagtttaca

SEQ ID NO: 24890 - DNA, 201 bp, Homo sapiens
gcgatctccgctcactgcaacctctgcctccggggttcaagcgattctcctgcctcagcctcctgagtagctgggattacaggcgcccaccaccatgcccrgctaatttttgtatttttagtagagacggggtttcgccgtgttggtcaggctggtctcgaactcctgacctcgtgatccaccccgccgcctcccaaagtg

SEQ ID NO: 24891 - DNA, 201 bp, Homo sapiens
atgagtccgtccttcacagaacgcactgcgtagccgggaagctgagcctagaccgtatccatttctcgtccactcctgccttcagggcccagcccagcagratcccagaggctccctcttcccacccaagctcgaacagagtgtttggagactgggctcggacgtcagcacccatcaggtgtttggtgggtagggccaggt

SEQ ID NO: 24892 - DNA, 201 bp, Homo sapiens; identical to SEQ ID NO: 17659

SEQ ID NO: 24893 - DNA, 201 bp, Homo sapiens; identical to SEQ ID NO: 17695

SEQ ID NO: 24894 - DNA, 201 bp, Homo sapiens
ccccttcctgagggaaccctcacccctcaaccacaataaaaacccaggccagtctccttcctggctctcccaacacatctgggacctgcttgaaagactgsccctgctccccctggagacctcaattatgtaaataataaaccttttcatactctcttggtgtttgggtggtgtcgtcagtcttcattcaaaccaaacctt

SEQ ID NO: 24895 - DNA, 201 bp, Homo sapiens
tggttcaggtgaagttttcccagctggaacaatgacaatgtcaatatcccacaaaggcggcttctgtttatttagcgcttgctgtgttcccacaagtcttyctctacctgccctctccccagccctcatctcactctcccagagccccagagcacaccaatggacaccatcacctctcgggcagatcagcacagagacgtg

SEQ ID NO: 24896 - DNA, 201 bp, Homo sapiens; identical to SEQ ID NO: 17701

SEQ ID NO: 24897 - DNA, 201 bp, Homo sapiens
aagacagacatatttagcagtggtaacaaccaaatgtcgctaattataattaccaaaaagcatttttccccctaagtgctgcgacttctggtatcaaaggmtaagactgtcaatgtagaaatgagtccgtccttcacagaacgcactgcgtagccgggaagctgagcctagaccgtatccatttctcgtccactcctgcct

SEQ ID NO: 24898 - DNA, 201 bp, Homo sapiens
tcgctaattataattaccaaaaagcatttttccccctaagtgctgcgacttctggtatcaaaggctaagactgtcaatgtagaaatgagtccgtccttcayagaacgcactgcgtagccgggaagctgagcctagaccgtatccatttctcgtccactcctgccttcagggcccagcccagcagaatcccagaggctccct

SEQ ID NO: 24899 - DNA, 201 bp, Homo sapiens
taccaaaaagcatttttccccctaagtgctgcgacttctggtatcaaaggctaagactgtcaatgtagaaatgagtccgtccttcacagaacgcactgcgyagccgggaagctgagcctagaccgtatccatttctcgtccactcctgccttcagggcccagcccagcagaatcccagaggctccctcttcccacccaagc

SEQ ID NO: 24900 - DNA, 201 bp, Homo sapiens
ccctggctcagaatctgccaggctcaagcattcattgacagcctactatgtaccaatcctgggctgagtcccaacccggggatgacttagaggaggccagsatgtggcctcatgttctggttgctctcacatttaaacaggctaaacccactttgcattgtatgttaggggtggtgcttgtgggacaaagggggctgtcag

SEQ ID NO: 24901 - DNA, 201 bp, Homo sapiens; identical to SEQ ID NO: 17708

SEQ ID NO: 24902 - DNA, 201 bp, Homo sapiens
cctatgcgactgcatgtctgaatgttttatgtatatttgaatatagatagggaacaaatatttatggagcacatattatgtgtgcagccttttacgtgtgytactttctaataaccctaggaggcgtagatgcctcccaggctatggttgaaaatactgacatgcccaaggtgcaggaggtatgaatacctccccactgtg

SEQ ID NO: 24903 - DNA, 201 bp, Homo sapiens
ggaaagaaaggagctggagaagagaggcagaaaaattgggtcctggttcaggtgaagttttcccagctggaacaatgacaatgtcaatatcccacaaaggyggcttctgtttatttagcgcttgctgtgttcccacaagtcttcctctacctgccctctccccagccctcatctcactctcccagagccccagagcacacc

SEQ ID NO: 24904 - DNA, 201 bp, Homo sapiens
accgtaacaacatgcaaatggtgagttctgctggggggtcatggaagctccctggaggaggtgtatctggacaacagggaaagaaaggagctggagaagaraggcagaaaaattgggtcctggttcaggtgaagttttcccagctggaacaatgacaatgtcaatatcccacaaaggcggcttctgtttatttagcgcttg

SEQ ID NO: 24905 - DNA, 201 bp, Homo sapiens
agtagacccccaataacagtaaggactatgatcaaagatgtcaatgtcaaaatgcttagtagcaccaccaacaaactattattagagtcagtaaataccamaaatagtcatcagacatctgtaagagaagtgagtgaacccaggcacaatcacttctattctcacactactcaaatacttagcacctccacgttcccttca

SEQ ID NO: 24906 - DNA, 201 bp, Homo sapiens
gtttataaacccagaggttttttatgggctcaactttctccgcctggtgcacttggaaggaaatcagctcactaagctccacccagatacatttgtctctytgagctacctccagatatttaaaatctctttcattaagttcctatacttgtctgataacttcctgacctccctccctcaagagatggtctcctatatgcc

SEQ ID NO: 24907 - DNA, 201 bp, Homo sapiens
gatggggaggcaactctttttttttttttttttttttttttgagacagagttttgctcttgttgcccaggctggagtgcaatggtgtgatcttggctcacygcaacctctgcctcccgggttaagtgattctcctacctcagcctcccgagcagctgggattatagacatgtgccaccatgcctggctaattttgtatttt

SEQ ID NO: 24908 - DNA, 201 bp, Homo sapiens
gtctagcaccaatgaagctaaaagagattcagtgattacatcgtcactttcaggtgctatcaccaagccaccaatgactattatagccattacaaggtttkcaagaaggaaaattccctggcaacagaactttgtaaataaccataacccaaaaggcagattaaggaatcaacataaagttagtttacaaaaaagcacagc

SEQ ID NO: 24909 - DNA, 201 bp, Homo sapiens
gtgaaaccccatctctactaaaactacaaaaattagctgggcatggtggtgggcacctgtaatcccagctactcaggaggctgaggcaggagaatcgctgsaacccgggaggcggaggttgcagtaagcagagatcacaacactgcactccagcctgggcgacagagcaagacgctgtctcaaaaaaaaaaaaaagaaaaa

SEQ ID NO: 24910 - DNA, 201 bp, Homo sapiens
ttttttattgcaacaatttaaagctaatcacacatacaaaaacaggtaactatgaggtgatggatatgctagttaatcgtggtcatttctctctctctctmtatatatatatacctcaaaatgtatgtgtatatatatatctcaaaatgtatatatatatatatctcaaatatgtgtatatatatacacacacacctcaaa

SEQ ID NO: 24911 - DNA, 201 bp, Homo sapiens
gaacccacagatttcaaactgtctactgctattaaaactacagccatgtcaaagaatataaacccaaccatgtcaagccaaatacaaggcacaaccaatcmacattcatccactgtctttccactgctacttggagcaactgaatttcaggactctgaccagatgggaagaggaagagagcatttccaaagtagaccccca

SEQ ID NO: 24912 - DNA, 201 bp, Homo sapiens
aaatgagctcatgagaattttgtttgttgggggcaataagaaaacttttcctggtaaacttttattaggagaaagttcttctagaatttgaagtccctctwggtaggttgggagactcatgacggtaaaaagcttctttctggctacatttttgctggaaaatgatatagtttctgttaactattggggttatgatcattc

SEQ ID NO: 24913 - DNA, 201 bp, Homo sapiens
ggtgaaaccccatctctactaaaactacaaaaattagctgggcatggtggtgggcacctgtaatcccagctactcaggaggctgaggcaggagaatcgctkgaacccgggaggcggaggttgcagtaagcagagatcacaacactgcactccagcctgggcgacagagcaagacgctgtctcaaaaaaaaaaaaaagaaaa

SEQ ID NO: 24914 - DNA, 201 bp, Homo sapiens
acaaatttgagtacagctacttctaacaggtttccgcacatcttagggcggctctcaaagaaaccttggtttaggttcttggtttaagaagtttaagtackaagcaacaatctgtttcagcaccttttgaccacaacaaaagcaaagaagagtcctacataaataagaacaaagtttataaagtgcttatgagattacaaa

SEQ ID NO: 24915 - DNA, 201 bp, Homo sapiens
tgaaacacaaatggactatgatttcaagggataacaatactaagctggaacatactgtcttggtaggtggaaccgttggcctgaactgcccaggccaaggrgaccccaccccacacgtggattggcttctagctgatggaagtaaagtgagagccccttatgtcagtgaggatggacggatcctaatagacaaaagtggaa

SEQ ID NO: 24916 - DNA, 201 bp, Homo sapiens
agttttgttattgataggacttttccctcttgtgaaaattcctttgacaacataaatatgttcttttttttaattcataggtcttaaaaatgagctataayaaagtccgaaaacttcagaaagatactttttatggcctcaggagcttgacacgattgcacatggaccacaacaatattgagtttataaacccagaggttt

SEQ ID NO: 24917 - DNA, 201 bp, Homo sapiens
atggcttagaagacaataagctggtagtaattttatttttttattgcaacaatttaaagctaatcacacatacaaaaacaggtaactatgaggtgatggayatgctagttaatcgtggtcatttctctctctctctatatatatatatacctcaaaatgtatgtgtatatatatatctcaaaatgtatatatatatatatc

SEQ ID NO: 24918 - DNA, 201 bp, Homo sapiens
acctgttattctagagcaaaggaggcaagtcattgtaggcacttggggtgaaagtttaaaactgccctgtactgcaaaaggaactcctcagcccagcgttyactgggtcctctctgatggcactgaagtgaaaccattacagtttaccaattccaagttgttcttattttcaaatgggactttgtatataagaaacctagc

SEQ ID NO: 24919 - DNA, 201 bp, Homo sapiens
aaaaggcatcagtggagaatctctatcactgcattgtgtgtctgatggaatccctaagccaaatatcaaatggactatgccaagtggttatgtagtagacwggcctcaaattaatgggaaatacatattgcatgacaatggcaccttagtcattaaagaagcaacagcttatgacagaggaaactatatctgtaaggctca

SEQ ID NO: 24920 - DNA, 201 bp, Homo sapiens
ctgcacgaatcctcaaggcacaatgctaaaccacagcaattagtagcagaggttgcaacatcccccaaggttcacccaaatgccaagttcacaattggaaycactcacttcatctactctaatctgttacattctactcccatgccagcactaacaacagttaaatcacagaattctaaattaactccatctccctgggca

SEQ ID NO: 24921 - DNA, 201 bp, Homo sapiens
tcccagcactttggggaggccaaggtgggtggattacctgaggtcaggagttcaggatcagcctggccaacatggtgaaacccctactctactaaaaaaakacataaattagccgggtgtggtggtgggcacctgtagtcccagctactcgggaggctgagacagaagaattgctcgaacctgggaggcggaggttgcagt

SEQ ID NO: 24922 - DNA, 201 bp, Homo sapiens
atcataaagtggtagtgcaatatgttaccttttctaagtttagatacataaataattacaattgtattacaattgcttacagtattcagtagagtaatacrctgtatgggtctgtagcctaggagcagtaggctttaccatatagcctaggtgtgtagtaggctatactatctaggtttgtgtaagtacactgcataatgt

SEQ ID NO: 24923 - DNA, 201 bp, Homo sapiens
agcagttttagagtacacatagactttggacataaaggaaactctctcaaaaaaaactaatcttttgagatcatttgaatacaaaaaccattcttttcacwtgcttaactcaaagggtcaacttcttagggtttttatattttaggcagaattaaaaaatctcatttatctccatacttggcacagttttaaaatagtaac

SEQ ID NO: 24924 - DNA, 201 bp, Homo sapiens
agtccgaaaacttcagaaagatactttttatggcctcaggagcttgacacgattgcacatggaccacaacaatattgagtttataaacccagaggtttttkatgggctcaactttctccgcctggtgcacttggaaggaaatcagctcactaagctccacccagatacatttgtctctttgagctacctccagatatttaa

SEQ ID NO: 24925 - DNA, 201 bp, Homo sapiens
ctctatatgtgtaaaataattaaacccataggggctcacatctttcagtcttaataatcaagtgttatccttttgactgagatgacttaataatttttacragacccatgggtcagtcacatcaacctcttctgctttgaaaaattttcatgatttcaagagattcgacagttgttcatggcttcaggtgcctcacttggc

SEQ ID NO: 24926 - DNA, 201 bp, Homo sapiens
ggcaggagaattgcttgaacctggaaggcagaggttgcagtgaaccgagattgcaccactgcactccagcctaggcaacagagtgagactttgtctcaaaaaaaaaaaaaaaaaaaatagtaattgtataaatatattcacactctctgtaaacaaaacagagaagggaatttttatgatgcagtggagattctagagaga

SEQ ID NO: 24927 - DNA, 201 bp, Homo sapiens
agaggttgaggttggtggattgcttgaacctgggaggttgagactgcagtgagccgtgatctcaccactgcactctagcctgggctccagagtgacaccctgtctcaaaaaaatataaagtaaatagaaaataggagagagagaaatgacttgaggctgtttgacttggttagcacttatgctatgaaaacagtttttact

SEQ ID NO: 24928 - DNA, 201 bp, Homo sapiens
tttttttattgcaacaatttaaagctaatcacacatacaaaaacaggtaactatgaggtgatggatatgctagttaatcgtggtcatttctctctctctctatatatatatatacctcaaaatgtatgtgtatatatatatctcaaaatgtatatatatatatatctcaaatatgtgtatatatatacacacacacctcaa

SEQ ID NO: 24929 - DNA, 201 bp, Homo sapiens
tcgtggtcatttctctctctctctatatatatatatacctcaaaatgtatgtgtatatatatatctcaaaatgtatatatatatatatctcaaatatgtgwatatatatacacacacacctcaaaatgtatatatatctctctcaaaatgtcatgttctacacctcaaagatacacaattttcattggtcatgcttcaata

SEQ ID NO: 24930 - DNA, 201 bp, Homo sapiens
caaatacagtggtcaagctgcacgaatcctcaaggcacaatgctaaaccacagcaattagtagcagaggttgcaacatcccccaaggttcacccaaatgcyaagttcacaattggaaccactcacttcatctactctaatctgttacattctactcccatgccagcactaacaacagttaaatcacagaattctaaattaa

SEQ ID NO: 24931 - DNA, 201 bp, Homo sapiens
tcattaagccagaagtctgccatgttgtcttagcccagggtactgataagtaggtaaaggaatacagcttgttggcaagtgggtgatggggaggcaactctttttttttttttttttttttttttgagacagagttttgctcttgttgcccaggctggagtgcaatggtgtgatcttggctcaccgcaacctctgcctccc

SEQ ID NO: 24932 - DNA, 201 bp, Homo sapiens
ccaagaagggtaaatgcaatgactgacaaatgcaaccctattaagaaaaagcctacagtgtaaacaagagagtctatgggcttcttatatccaagaactgdgattgataggtatagctgactccatttgatttcaaggtcttgtctttaaggggagctggggtctcgctccatcttattctaaggtaatttcctctggtaa

SEQ ID NO: 24933 - DNA, 201 bp, Homo sapiens
attctaaggtaatttcctctggtaaggtaaagtaccaggttctgccacagggctttaccttgtgaccatcttaatgcaaaagaatgcatttgcaagaaaasaaaaaaaaaaaaaaaaaaagaaacctctcaagatacagaattaacagggagaaaatctgaagactaaagtaattctagttattttctttataatgcgcag

SEQ ID NO: 24934 - DNA, 201 bp, Homo sapiens
aatgcagaataaacaggccatgtttctgtcaagatctgacatgcctttcaaatcagtagtttggtccagcacagtttggaaaataaaattaaaaaaaaaamaacaacgtcatcattaatgaatgaaatacataaataccttagatccatcataatccattctttctagaaatgtgagattcaaaaaaagcaccaatttcaa

SEQ ID NO: 24935 - DNA, 201 bp, Homo sapiens
gagtaggcctgcctgcatgattcacatttgtaaacctactttaaaggtgaattcaacaaaatcaaaccacaacttctccttggctttttgtttaaacaccttttttttttttgtgagatgtagcataaaatatagtaaaatgtcaaagaaatgaaaaaaagggacatttttaagatgactaatgcattaaatttgattttc

SEQ ID NO: 24936 - DNA, 201 bp, Homo sapiens
gtatagctgactccatttgatttcaaggtcttgtctttaaggggagctggggtctcgctccatcttattctaaggtaatttcctctggtaaggtaaagtamcaggttctgccacagggctttaccttgtgaccatcttaatgcaaaagaatgcatttgcaagaaaagaaaaaaaaaaaaaaaaaaagaaacctctcaagat

SEQ ID NO: 24937 - DNA, 201 bp, Homo sapiens
ctcttgtgaaaattcctttgacaacataaatatgttcttttttttaattcataggtcttaaaaatgagctataacaaagtccgaaaacttcagaaagataytttttatggcctcaggagcttgacacgattgcacatggaccacaacaatattgagtttataaacccagaggttttttatgggctcaactttctccgcctg

SEQ ID NO: 24938 - DNA, 201 bp, Homo sapiens
taaaaggcagaggaatcacctgcttgctggtctcctttgctgtgatctgcctggtcgccacccctgggggcaaggcctgtcctcgccgctgtgcctgttayatgcctacggaggtacactgcacatttcggtacctgacttccatcccagacagcatcccgcccaatgtggaacgcatcaatttagggtgtgtgagacctc

SEQ ID NO: 24939 - DNA, 201 bp, Homo sapiens
cctaaggagaaaaataaattgaaccaaaattacagacacaaaactattgcacagatggatgctaccctcttgtcactgctctcagtaccagctgcaggtasagggaaacagaatggccggagagtactatccttgccctgaaaaacccttgtggtgggattcaagtaccaccctgcagaggggacacctttattcacagtc

SEQ ID NO: 24940 - DNA, 201 bp, Homo sapiens
agggtctaggtctattatatataatgaagtttcactgtatttaaaatctgatcaatcctacacaaaatgtgtttttgtaattcactgaatttatattacawgcttaattcaacctgaattaatttggggaatattaaatgattgatcttatctaaatctaggggtggggttttccagtgtaatttctccagcatctattca

SEQ ID NO: 24941 - DNA, 201 bp, Homo sapiens
gcagaaggtaggccaagccctacagttacctggattcttgcaaaccaaacagttgtctcagaatcatcccagggaagtaggcaggctgtggtgacggttgwcggaacattggtcctccacaatctcagtatttatgaccgtggcttttacaaatgtgtggccagcaacccaggtggccaggattcactgctggttaaaata

SEQ ID NO: 24942 - DNA, 201 bp, Homo sapiens
caacgtggcgactcccatttccgggcttatgacaaatacagtggtcaagctgcacgaatcctcaaggcacaatgctaaaccacagcaattagtagcagagrttgcaacatcccccaaggttcacccaaatgccaagttcacaattggaaccactcacttcatctactctaatctgttacattctactcccatgccagcact

SEQ ID NO: 24943 - DNA, 201 bp, Homo sapiens
tatgatcaaagatgtcaatgtcaaaatgcttagtagcaccaccaacaaactattattagagtcagtaaataccacaaatagtcatcagacatctgtaagasaagtgagtgaacccaggcacaatcacttctattctcacactactcaaatacttagcacctccacgttcccttcagatccacacacagctgctcattctca

SEQ ID NO: 24944 - DNA, 201 bp, Homo sapiens
ccaacatagaggcagatctcagagcagatccctcttggttaatgcaagaccaaatttccttgcagctgaacagaactgccaccacattcagtacattacaratccagtactccagtgatgctcaaatcactttaccaagagcagagatgaggccagtgaaacacaaatggactatgatttcaagggataacaatactaagc

SEQ ID NO: 24945 - DNA, 201 bp, Homo sapiens
gacatagaaggaacagcgtatgccagagccaatggggcatggcagggttgaggaatggaaaggatttccatggggctggaaccgagggaatgggggtgatrtggtcaggtttgcatttgaggcaaaatacctgatgtccaaggcctgctaactctggctcagtgcaagcaataataagcatgccacagtgtgagcatagtc

SEQ ID NO: 24946 - DNA, 201 bp, Homo sapiens
aaaccccatctctactaaaactacaaaaattagctgggcatggtggtgggcacctgtaatcccagctactcaggaggctgaggcaggagaatcgctggaamccgggaggcggaggttgcagtaagcagagatcacaacactgcactccagcctgggcgacagagcaagacgctgtctcaaaaaaaaaaaaaagaaaaagaa

SEQ ID NO: 24947 - DNA, 201 bp, Homo sapiens
aatagtgaataatgaaaaagtaggatataagaagtgaagggtacccagagactataaaacagggagcccacccagaagaagtgctgttcagactgggttcygaaggatgattggtaagtacttgggtcatgatgaaagacaccaagtgtgcgggacatagaaggaacagcgtatgccagagccaatggggcatggcagggt

SEQ ID NO: 24948 - DNA, 201 bp, Homo sapiens
ttttattgcaacaatttaaagctaatcacacatacaaaaacaggtaactatgaggtgatggatatgctagttaatcgtggtcatttctctctctctctatmtatatatatacctcaaaatgtatgtgtatatatatatctcaaaatgtatatatatatatatctcaaatatgtgtatatatatacacacacacctcaaaat

SEQ ID NO: 24949 - DNA, 201 bp, Homo sapiens
gagagatctagagcacaaacaatacaaagagaacaggagcctcaaaagaagaacaggactgacccaaacatctctccagaccagagttctggcttcactayacccactgctatgacacctcctgttctaaccacagccgaaacttcagtcaagcccagtgtctctgcattcactcattccccaccagaaaacacaactggg

SEQ ID NO: 24950 - DNA, 201 bp, Homo sapiens
catcgtttatttgacattagtgagcatgtactatgcactggggatacaatggtaagatatactattcacttctaggatgtgtattgatcgttaaaaagacmagacaaatgtacggtcagtacaattaataaaaactaatagagcatacaaagtgttttagagacagtcactaatattaagagctaacattaaggttgtgct

SEQ ID NO: 24951 - DNA, 201 bp, Homo sapiens
caaagcacctggcagtttctcttcctttaggtgtatttgtattgattttactttggtttatatgccagagaacttccttccatacttggggaaaaaaaaawtttctctaatattttactataatactttccatacttacctttgctggagaataacagtgacttgatgactgggtgtggtggttcacgcctgtcattccag

SEQ ID NO: 24952 - DNA, 201 bp, Homo sapiens
aaggcaagttgctaaatctctctaaataccaatttttcagctgtatagtgagggaattacttcaagattaaacaaccagtgcaaagcacctggcagtttcycttcctttaggtgtatttgtattgattttactttggtttatatgccagagaacttccttccatacttggggaaaaaaaaaatttctctaatattttacta

SEQ ID NO: 24953 - DNA, 201 bp, Homo sapiens
acacaatcctggaagtcttccaacaaagaaggagcttcccttcccaccccttaaccctatgcttcctagtattataagcaaagactcaagtacaaaaagcrtcatatcaacgcaaacagcaataccagcaacaactcctaccttccctgcatctgtcatcacttatgaaacccaaacagagagatctagagcacaaacaat

SEQ ID NO: 24954 - DNA, 201 bp, Homo sapiens
acagctgctcattctcagtttccgatccctagaaatagtacagttaacatcccgctgttcagacgctttgggaggcagaggaaaattggcggaagggggcrgattatcagcccatatagaactccagttctgcgacggcatagatacagcattttcaggtcaacaaccagaggttcttctgaaaaaagcactactgcattc

SEQ ID NO: 24955 - DNA, 201 bp, Homo sapiens
tgaaaggacaaaggcccttggagcatgatggagaaacagagggatctggacttgatgagtccaatcctattgctcatcttaaggagccaccaggtgcacarctccgtacatctgctctgatggaggctgaggttggaaaacacacctcaagcacaagtaagaggcacaactatcgggaattaacactccagcgacgtggag

SEQ ID NO: 24956 - DNA, 201 bp, Homo sapiens
gtgccataaaataaagtcaataatatccttgtaaaagatgaagtacctgtgttcatagagccttctaacatataccagagctatgtaagggaggttataamcatggtgagagcaatagagtataatgtagctatgtgattctgttgatttggttaatcaggctctatttggaatgtatgtcttcggaggaatagatggatt

SEQ ID NO: 24957 - DNA, 201 bp, Homo sapiens
ccccatctctactaaaactacaaaaattagctgggcatggtggtgggcacctgtaatcccagctactcaggaggctgaggcaggagaatcgctggaacccrggaggcggaggttgcagtaagcagagatcacaacactgcactccagcctgggcgacagagcaagacgctgtctcaaaaaaaaaaaaaagaaaaagaaaaa

SEQ ID NO: 24958 - DNA, 201 bp, Homo sapiens
gttatatctactcctattagaagtcttttgcctttcctgcatctagtttatctttaactgtggtttcaatatgtcccaaacttacatatatgtataaaaayacatcatatatgcatttatacatctgtcatatgtacatatacatatgcacacacacataatcacacactgcatactgacatctcagtcaacaacagatgg

SEQ ID NO: 24959 - DNA, 201 bp, Homo sapiens
atctttaactgtggtttcaatatgtcccaaacttacatatatgtataaaaacacatcatatatgcatttatacatctgtcatatgtacatatacatatgcrcacacacataatcacacactgcatactgacatctcagtcaacaacagatggcatatataatgatcctcccataagatttacaatggaggtgaaataaaac

SEQ ID NO: 24960 - DNA, 201 bp, Homo sapiens
actccagatggctgatagttttgacacaggcgtatatcactgtataagcagcaattatgatgatgcagatattctcacctataggataactgtggtagaayctttggtcgaagcctatcaggaaaatgggattcatcacacagttttcattggtgaaacacttgatcttccatgccattctactggtatcccagatgcctc

SEQ ID NO: 24961 - DNA, 201 bp, Homo sapiens
cattaagccagaagtctgccatgttgtcttagcccagggtactgataagtaggtaaaggaatacagcttgttggcaagtgggtgatggggaggcaactctttttttttttttttttttttttttgagacagagttttgctcttgttgcccaggctggagtgcaatggtgtgatcttggctcaccgcaacctctgcctcccg

SEQ ID NO: 24962 - DNA, 201 bp, Homo sapiens
cccgaattacaaatcgtccacccaggagtattgtcaccaggacaggggcagcctttcagctccactgtgtggccttgggagttcccaagccagaaatcacrtgggagatgcctgaccactcccttctctcaacggcaagtaaagagaggacacatggaagtgagcagcttcacttacaaggtaccctagtcattcagaatc

SEQ ID NO: 24963 - DNA, 201 bp, Homo sapiens
tcaagcacaagtaagaggcacaactatcgggaattaacactccagcgacgtggagattcaacacatcgacgttttagggagaataggaggcatttccctcsctctgctaggagaattgacccacaacattgggcggcactgttggagaaagctaaaaagaatgctatgccagacaagcgagaaaataccacagtgagccca

SEQ ID NO: 24964 - DNA, 201 bp, Homo sapiens
ttactgttgtttgcaatgctgagctacaaaatatatggttcaaactgaactggcaaagaaatttggaaagaaataatgatggaacatgactcactcactargcacaacattcacatttcggttgatttgccaatgcagtcattatatagatatattactttgaagaaaacaacttcattagcttatctaagtatgtttctt

SEQ ID NO: 24965 - DNA, 201 bp, Homo sapiens
cttgaaagtgggtaagctgggtggggggctctgggagaggtcagtgctgagtaaggcaattcccagcagcttgagccccaccaggtcactccagtattccyccccattctttttttttttttttttttttctcttgagacggagtctcgctctgtcgccgaggctggagtgcagtggcgcgatctcggctcactgcaagct

SEQ ID NO: 24966 - DNA, 201 bp, Homo sapiens
aggacctgaagggtgacatcccaggaggggcctctgaaatttcccacaccccagcgcctgtgctgaggactccctccatgtggccccaggtgccaccaatraaaatcctacagaaaattctctcctgagtgcttctttactctggggaaggggctgcgggagagggtaggggcttccagagagggcagggtctgcaggaga

SEQ ID NO: 24967 - DNA, 201 bp, Homo sapiens
ttttcagtagagacagggtttcaccgtggtctcgatctcctgactttgtgatccgcctgcctcgacctcccaaagtgctgggattacaggcgtgagccacygcgtccggccattcctccccattctaaccacatgatccccaaggatctctatccatcccggtatcccaacctaagggggttccaataacaaatttttggc

SEQ ID NO: 24968 - DNA, 201 bp, Homo sapiens
ggtctccaggttctcccaggctcagtcccgcaggcgccaaatctgcgcaggagagcactagcaaccgatgacgtattgaggcccacacctctgggattggytgtcctgcttcgacagccttgaaagtgggtaagctgggtggggggctctgggagaggtcagtgctgagtaaggcaattcccagcagcttgagccccacca

SEQ ID NO: 24969 - DNA, 201 bp, Homo sapiens
ccccattctaaccacatgatccccaaggatctctatccatcccggtatcccaacctaagggggttccaataacaaatttttggccgggcagggtggctcaygcctgtaatcccagcactttgggaggccgaggcgggcagatcacttgaggtcaggagttcgaaaccagcctggccaacatggtgaaacttcgtctctact

SEQ ID NO: 24970 - DNA, 201 bp, Homo sapiens
tgaggtcaggagttcgaaaccagcctggccaacatggtgaaacttcgtctctactaaaaatacaaaaaaattagccaggtgtggaggcacgcgcctgtagkcccagctactcgggaggctgaggcaggagaatcacttgaacccgggaggcggaggttgcagtgagccgagatcataccactgcactccagcctggctgac

SEQ ID NO: 24971 - DNA, 201 bp, Homo sapiens
aaggagaaactcaagattgactcatgaggacctgaagggtgacatcccaggaggggcctctgaaatttcccacaccccagcgcctgtgctgaggactccckccatgtggccccaggtgccaccaataaaaatcctacagaaaattctctcctgagtgcttctttactctggggaaggggctgcgggagagggtaggggctt

SEQ ID NO: 24972 - DNA, 201 bp, Homo sapiens
tccggcctcgccatgaggctcttcctgtcgctcccggtcctggtggtggttctgtcgatcgtcttggaaggtaaaagtgggatgggagaattgcggagttrgagatttggaagagtgaaggtggctacaggcctggggtcccggcttagaggacctctgagagctccggggccccttctgggtcgtggttgcctcatcgtg

SEQ ID NO: 24973 - DNA, 201 bp, Homo sapiens
gaggctcttcctgtcgctcccggtcctggtggtggttctgtcgatcgtcttggaaggtaaaagtgggatgggagaattgcggagttggagatttggaagartgaaggtggctacaggcctggggtcccggcttagaggacctctgagagctccggggccccttctgggtcgtggttgcctcatcgtggtcgggtgggtctc

SEQ ID NO: 24974 - DNA, 201 bp, Homo sapiens
ccagcctgataaaggtcctgcgggcaggacaggacctcccaaccaagccctccagcaaggattcaggttggtgctgagtgcctgggagggacacccgcctmcactctgcaagaaactcaaaaagggagatgaggggatcgtgggagggaggtagggagggaggagggtgccactgatcccctgaacccctgcctctgcctc

SEQ ID NO: 24975 - DNA, 201 bp, Homo sapiens
gatggttttgtgaggtaatgaaaatgaaggccccaagcttggccagacctgggtccccaggctggagtagcaccccttcctgtgtgatcttgacagagggrcattactgtgagcctcagtttcctctcctataaactggtggttctacagggaagtaaaggagcaggcctacagggtgtctggtacatgtagatgctcagt

SEQ ID NO: 24976 - DNA, 201 bp, Homo sapiens; identical to SEQ ID NO: 16061

SEQ ID NO: 24977 - DNA, 201 bp, Homo sapiens; identical to SEQ ID NO: 16062

SEQ ID NO: 24978 - DNA, 201 bp, Homo sapiens
cctgacggcgaggatgagcaagttctggattgggctccagcgagagaagggcaagtgcctggaccctagtctgccgctgaagggcttcagctgggtgggcrggggggaggacacgccttactctaactggcacaaggagctccggaactcgtgcatctccaagcgctgtgtgtctctgctgctggacctgtcccagccgct

SEQ ID NO: 24979 - DNA, 201 bp, Homo sapiens
aaatgtcagtaatcacttcatgaacgctaaatgagaatgtaagtatttttaaatgtgtgtatttcaaatttgtttgactaattctggaattacaagatttytatgcaggatttaccttcatcctgtgcatgtttcccaaactgtgaggagggaaggctcagagatcgagcttctcctctgagttctaacaaaatggtgctt

SEQ ID NO: 24980 - DNA, 201 bp, Homo sapiens
ttatttctcttcttagcttctccattgtctaaatcaggaaaacaggaaaacacagctttctagcagctgcaaaatggtttaatgccccctacatatttccrtcaccttgaacaatagctttagcttgggaatctgagatatgatcccagaaaacatctgtctctacttcggctgcaaaacccatggtttaaatctatatgg

SEQ ID NO: 24981 - DNA, 201 bp, Homo sapiens
ccccagtgggtcctcaggcgtctggagggagcccagcatccatcacgccacagctgcctctggcccccaggagcctgcaggtggggactcctccgtggccrcacaaaacaacgatggcactgacgggcaaaagctgcttttattctacatcctaggcaccgtggtggccatcctactcctgctggccctggctctggggct

SEQ ID NO: 24982 - DNA, 201 bp, Homo sapiens
ctcaggcgtctggagggagcccagcatccatcacgccacagctgcctctggcccccaggagcctgcaggtggggactcctccgtggccacacaaaacaacratggcactgacgggcaaaagctgcttttattctacatcctaggcaccgtggtggccatcctactcctgctggccctggctctggggctactggtctatcg

SEQ ID NO: 24983 - DNA, 201 bp, Homo sapiens
cacagaggcgccatggcttccaacgctgtctgttttgtttcccatagtccgacacctgggacagactgctgaaagtgaggtggccctagagacactagagwcaccagccaccatcctcagagctttgaactccccattccaaaggggcacccacatttttttgaaagactggactggaatcttagcaaacaattgtaagtc

SEQ ID NO: 24984 - DNA, 201 bp, Homo sapiens
ggagaaccagtacaggtaaagggggccctgagtgaccgggggaggggatgggcaggcatgggggcactgactacagtacaaagaggtggcagcaagagcargcccaggtttcctgtgggcagacacaccctggtccttgcagctgacccctcaacctccccccacgccaggcactcgggcccccttagagcatactgccca

SEQ ID NO: 24985 - DNA, 201 bp, Homo sapiens
gggcacccccaaggctacacccaccacaagtagaccttcgctgtcatctgacgcccccatcacatctgccccactcaagatgctggcccccagtgggtccycaggcgtctggagggagcccagcatccatcacgccacagctgcctctggcccccaggagcctgcaggtggggactcctccgtggccacacaaaacaacga

SEQ ID NO: 24986 - DNA, 201 bp, Homo sapiens
atggggtctcttgcaccatggggcctgtgtctctgggaccaccatctgggccccccgatgaggaggacaaaggagagaaagaagggagcaccgtgccccgygctgcaacagccagtcccacaaggggccccgagggcacccccaaggctacacccaccacaagtagaccttcgctgtcatctgacgcccccatcacatctg

SEQ ID NO: 24987 - DNA, 201 bp, Homo sapiens
agctccggaactcgtgcatctccaagcgctgtgtgtctctgctgctggacctgtcccagccgctccttcccagccgcctccccaagtggtctgagggcccstgtgggagcccaggctcccccggaagtaacattgagggcttcgtgtgcaagttcagcttcaaaggcatgtgccggcctctggccctggggggcccaggtc

SEQ ID NO: 24988 - DNA, 201 bp, Homo sapiens
tgaaggcagcaggagtcagagaactattcattgcaggaagccccaacatccggtgagaaataagaagtacaacagtacaggatgcgccttgggtcaggggracgtggaaagccctcagcctttgtgtccttctctgcgccggagtggctgcagctcacccctcagctccccttggggcccagctgggagccgagatagaag

SEQ ID NO: 24989 - DNA, 201 bp, Homo sapiens
cagggtcccctcctgggggatcccaaccaatgagcaaaggtctgtggctgcaggaaaagcacactgtgagtccctggcttttgccgagtcgcggtgtcgcrggagggcctgcccgggcttcgattcccgctccctgcccagatttccggcccttgctaggaatcctgagccgggggaagtgagcctgcaagccctgcgcca

SEQ ID NO: 24990 - DNA, 201 bp, Homo sapiens
ctctgcgccggagtggctgcagctcacccctcagctccccttggggcccagctgggagccgagatagaagctcctgtcgccgctgggcttctcgcctcccrcagagggccacacagagaccgggatggccacctccatgggcctgctgctgctgctgctgctgctcctgacccagcccggggcggggacgggagctgacac

SEQ ID NO: 24991 - DNA, 201 bp, Homo sapiens
gttctttgcatagatttggcttaagcttgaattagatccctgcaaaggcttgctctgtgatgtcagatgtaattgtaaatgtcagtaatcacttcatgaaygctaaatgagaatgtaagtatttttaaatgtgtgtatttcaaatttgtttgactaattctggaattacaagatttctatgcaggatttaccttcatcctg

SEQ ID NO: 24992 - DNA, 201 bp, Homo sapiens
ctaattctggaattacaagatttctatgcaggatttaccttcatcctgtgcatgtttcccaaactgtgaggagggaaggctcagagatcgagcttctcctytgagttctaacaaaatggtgctttgagggtcagcctttaggaaggtgcagctttgttgtcctttgagctttctgttatgtgcctatcctaataaactctt

SEQ ID NO: 24993 - DNA, 201 bp, Homo sapiens
ttctaacaaaatggtgctttgagggtcagcctttaggaaggtgcagctttgttgtcctttgagctttctgttatgtgcctatcctaataaactcttaaacmcattgattgtgaacttgttttaatatatttcacgacaactcgaaatacctggcagaacttgctttcaaggtcattacatttatccatctcccctttcaaa

SEQ ID NO: 24994 - DNA, 201 bp, Homo sapiens
gcaggctgggtccctctcctgctgggtggtgctttctcttgcacaccactcccaccacggggggagagccagcaacccaaccagacagctcaggttgtgcmtctgatggaaaccactgggctcaaacacgtgctttattctcctgtttatttttgctgttactttgaagcatggaaattcttgtttgggggatcttggggc

SEQ ID NO: 24995 - DNA, 201 bp, Homo sapiens
tgataggaataaactggacatgggtcagacgagagccacaagggtgtctgtccatagaaacaagttttatgtgagagagacccctggtcactgggcagggmtagaatttatagtcagtctctcaaagtgagagatacagcctgctaccaatgacaggggacttggagagcagtggagcctctccctcagctgagatggtgc

SEQ ID NO: 24996 - DNA, 201 bp, Homo sapiens
tacatttgcaaatatttctccctatgataatgtagtcgatagtgtgcactctttctctctctctctctctctcacacacacacacacacacacacacacasagacacggcaccattctgcctggggcactggaacacattcctgggggtcaccgatggtcagagtcactagaagttacctgagtatctctgggaggcctca

SEQ ID NO: 24997 - DNA, 201 bp, Homo sapiens
acacccacctcctggtgaccatttccctgtgggacaggcagatacagcccatttgatggtctcagtgactccacaccccacagggacttcccagacatgcygccatgcccacctctcagccacagggaccccacggagcccgtgtctgtttgctctaaacccaccagtgagaagtccccttgggaaacctgcttgggaaac

SEQ ID NO: 24998 - DNA, 201 bp, Homo sapiens
ctcagagaaagggtgtttctggttttgccttagcaatgcatcggtctctgaggtgacactctggagcggttgaagggccacaaggtgcagggttaatactsttgccagttttgaaatatagatgctatggttcagattgtttttaatagaaaactaaaggggcaggggaagtgaaaggaaagatggaggttttgtgcggct

SEQ ID NO: 24999 - DNA, 201 bp, Homo sapiens
ggtgagtgtttgtgacccagacagctccccactttttgctggccccgtggggtgcactgccctctccctgggatctgtaagtgacacggtgcttgtgttgyttcctgtgtcttcttgtgctgcctcctgcatctcccctgacccacaccccaacccaactctcctcccatcagggatctcttaggaagtggctgtcttgat

SEQ ID NO: 25000 - DNA, 201 bp, Homo sapiens
gcgtgccacggtggggatttcgtgactctataatgattgttactccccctcccttttcaaattccaatgtgaccaattccggatcagggtgtgaggaggcyggggctaaggggctcccctgaatatcttctctgctcacttccaccatctaagaggaaaaggtgagttgctcatgctgattaggattgaaatgatttgttt

SEQ ID NO: 25001 - DNA, 201 bp, Homo sapiens
ctgggaggcctcatgtctcctgtgggctttttaccaccactgtgcaggagaacagacagaggaaatgtgtctccctccaaggccccaaagcctcagagaargggtgtttctggttttgccttagcaatgcatcggtctctgaggtgacactctggagcggttgaagggccacaaggtgcagggttaatactcttgccagtt

SEQ ID NO: 25002 - DNA, 201 bp, Homo sapiens
agaggaaatgtgtctccctccaaggccccaaagcctcagagaaagggtgtttctggttttgccttagcaatgcatcggtctctgaggtgacactctggagyggttgaagggccacaaggtgcagggttaatactcttgccagttttgaaatatagatgctatggttcagattgtttttaatagaaaactaaaggggcaggg

SEQ ID NO: 25003 - DNA, 201 bp, Homo sapiens
ccaaggtggggacgtgcaggcacagaggcgccatggcttccaacgctgtctgttttgtttcccatagtccgacacctgggacagactgctgaaagtgaggkggccctagagacactagagtcaccagccaccatcctcagagctttgaactccccattccaaaggggcacccacatttttttgaaagactggactggaatc

SEQ ID NO: 25004 - DNA, 201 bp, Homo sapiens
tctgcggctgccgaccaggattccggctgctggatgacctggtgacctgtgcctctcgaaacccttgcagctccagcccatgtcgtgggggggccacgtgygtcctgggaccccatgggaaaaactacacgtgccgctgcccccaagggtaccagctggactcgagtcagctggactgtgtggacgtggatgaatgccagg

SEQ ID NO: 25005 - DNA, 201 bp, Homo sapiens
agtaatttcacctcagaaattcttcttcacatcagaaatgtagtttgtgcattgaggctatctgattgatgtttatgcctctctgcttgggatatattcakgagaataaataatagaaacctctcccaatgaatgcagtctgtctgaattcattgatctttatgcagtggagatattctgcacaagccgctattttatggg

SEQ ID NO: 25006 - DNA, 201 bp, Homo sapiens
ctgaagagcatcccaccctgctcacggaggcacccctgaaccccaaggccaaccgggagaaaatgactcaagtaagtatgctaccccagcacacaacactstggggtctggggaaacttctgttagaaggaggctatgcagcacagcagagagaaggccggagctaggagtccaccaacagactaacagccttcagtgaac

SEQ ID NO: 25007 - DNA, 201 bp, Homo sapiens
acagacccagtggcaatgccgccagcagtgtcagccctataaccacagataagaactcttcagagactgtattttggtgacatgcaattgtgggttttagsggtaggtaatggacacaaatctcatattttacaggatgtaagtcaatctagttcataagaaaaattgagttactttatataaaatttgatctctatttat

SEQ ID NO: 25008 - DNA, 201 bp, Homo sapiens
tcctcccttccccccgaggaccgaggaaacccgtcgggtacaccaggaaccttggtcatcctgtagatccaaagtcttttgtgaaggagagcttcaatcastaggaagctggggcagttgggtctagtcagcttgagagaaaagagctaatactgggttcacttgagctagctggtgccaatattgtcctgtgtgcccagg

SEQ ID NO: 25009 - DNA, 201 bp, Homo sapiens
ataacacttaaacaagaatcttgactatgtaaaaaaacaggaagagttaagattaaaaaaaaaaaaaaaaaaaaaaacttctacatctttttaccactaaracttttgttcttttcccctttggtcctaatgtttaaaaaatgttgtcaaccaaattgtttttactaaattgcaataagttgattttaataactcccagct

SEQ ID NO: 25010 - DNA, 201 bp, Homo sapiens
tggcttgtttgtggtcttctccaaaggcttctgaaaggaagagtccctatgagtaatatacaggacaggctgctctaatcattggtgatgattcaaataaycaactcatcctagatttcctgggacttttaaggcactgaaagtctcatatcctcccttccccccgaggaccgaggaaacccgtcgggtacaccaggaacc

SEQ ID NO: 25011 - DNA, 201 bp, Homo sapiens
atttgaagtgcaaaatctttagacatctattttggggaaaatgtcaagaacatttttctatttggcattggttcaccaaattgagtccttgagagcctgatttttttttttttcaccaaagagtcaagccaaatgaaattccacccacgttagtcagggtatatttctgggtcctctcaatgtctggtttagttctagttt

SEQ ID NO: 25012 - DNA, 201 bp, Homo sapiens
gctactcgggaggctgaggcatgagaatcgcttgaacctgggaggtggaggttgcagtgagctgagactgtgccactgcactccagcctgggcgacagagygagactctgtctcataacaaaaacacacaagacatagaggtaaatatttatgtatgcaaatatatatacctgttaatatttggcctggcaaaaacagttt

SEQ ID NO: 25013 - DNA, 201 bp, Homo sapiens
tagatttggataggtaatctgtgaatctaatcatatagacattgtcacctcctggagaacatattatttcctacaggattaaagaaatgacatatgcaaakcacctagtacacacaataaatactaatttttacttttacattgcttttcctaaatgaagtgacttcacaagacaaattgataatttgggggtcacagttc

SEQ ID NO: 25014 - DNA, 201 bp, Homo sapiens
tgattttaataactcccagctatagtgtatatccatgactgtttatcctgcctttctccttcttcttccttctggtaatagtacttccaagttgtctttaraaaaactgtccctctcccctcttcttaactatttgatgtgagtggttcttttagtcagggttctctagagaaatagaaccaagagaatgaataaatggaa

SEQ ID NO: 25015 - DNA, 201 bp, Homo sapiens
gagccttggctaattgctggagtcactcagagaaagacttgcggggcatttgactgggctgtccatgttgtggctgcaacatgagaggctcacagacgttyctggaatggacagttaaccatatgaaaaagtacagatgttgcgccatagggctctgaaaagggagggccccttagtttttatttctcaagaggaaaacaa

SEQ ID NO: 25016 - DNA, 201 bp, Homo sapiens
ttttatttaaaccacacaaatatgttgaaaggaatggtttaaagggacagacatttaaaaataaacaaaaataagatatcagtaatatctaatgcttatawaatgtccagaacatttgtgtgtgtgtgtgtgtgtgtgttttttttttttttttttttttttttttgcataacctgttaacttatctaaaccttacaactc

SEQ ID NO: 25017 - DNA, 201 bp, Homo sapiens
tttgggcggaggaatctgaatgtcagacatgagttcagacattatttttgtcagtttttggatgtataaatattaagtggggaattctttatatatatatacacacacacacacacacacacttttttattatactttaagttctagggtacatgtgcacaacgtgcaggtttgttacatatgtatacacgtgccatgttg

SEQ ID NO: 25018 - DNA, 201 bp, Homo sapiens
ttgggcggaggaatctgaatgtcagacatgagttcagacattatttttgtcagtttttggatgtataaatattaagtggggaattctttatatatatatacacacacacacacacacacacttttttattatactttaagttctagggtacatgtgcacaacgtgcaggtttgttacatatgtatacacgtgccatgttgg

SEQ ID NO: 25019 - DNA, 201 bp, Homo sapiens
tccttcaggtcagcagagtgcccgtgttaccaacattcacagctggttttgggataaagttattgttgtcatggattcaggaaaacaaacatgttaattgctttatgagttttaaacccaagatgatcaaaaaccctgcatatagatttgtccagctcccatcgctgaaaggaatcacctgtattacatatgctggctaca

SEQ ID NO: 25020 - DNA, 201 bp, Homo sapiens
ttctttagtaaggggctctttgctcagcaatccctgggaaaatctgtgctttgcagaaacgcaggggaaagcatgatggtcacccttggatgctttgcttwatggcttgaccttgcaactatggttcaacctgtttgcccgaggacctctgttctgtgcattggcttttggtggtcgatatgttggtatacctaatgtgtt

SEQ ID NO: 25021 - DNA, 201 bp, Homo sapiens
actgggtaatttataaagaaaagaggtttaatttactcacagttctgcatggctggggaggcctcaagaaacttaaactcatggcaaaaggggaagaggcrtgtcttacatggcagcaggcgagagagagcaagcaagagcagggaaaactgccttataaaaccatcagatatcgtgagaactcactcactttcatgagaa

SEQ ID NO: 25022 - DNA, 201 bp, Homo sapiens
tgggtgcagcacaccaacatggcacatgtatacatatgtaacaaacctgcacgttgtgcacatgtaccctaaaacttaaagtataataataataaaatttaaaaaaaaaagaaaaaaaaatcctaaaatgtttctttaaaaaaaaatcccttgccaggcatggttgctcacacgtgtaatcccaacactttgggaggccaa

SEQ ID NO: 25023 - DNA, 201 bp, Homo sapiens
gtgacctgctgaatttttctctggaaagaaagagggagggagcagagcctgcatctgacagctgtgtgtgcctcccggccggatatctggtttgcatctcyctcagcttaaagctcccttcagcctggtgaggcaagtgtgactgtgcagccagccctgccaacccaggctgagtttcactgcaaatcaaggtttggcagc

SEQ ID NO: 25024 - DNA, 201 bp, Homo sapiens
atatgtgctttgtggggagacatatgtttcatggtcaaataatcttagaaaattctgggttactttaatttgaaaactttcttaatccaaaacttctcagrgcccttagtatgctaatgtcaaagggttgggtaattatatatactgttccccaaacttctttgcctttggaatcctttgaagaatctattgaatgaacac

SEQ ID NO: 25025 - DNA, 201 bp, Homo sapiens
gaaggaatatctttcttctttgcatgctaccgtggtagaagggttttaaaagtccgtgctaggcagaggcagccctttctgcccctttctgttctcagttyattaggaaatggcctgaaattccagcatgatagcaagctggcatcctctgtggaatgtgcaaaccatgcctgcatctgcccattaccctagctcagtgtc

SEQ ID NO: 25026 - DNA, 201 bp, Homo sapiens
gaagagctgtttcttgagatggaaacgtccaaagacctccttaaacagggtagtgactttgcctatgagtagagaaaaagttggtaggtgccttgatccargtacagtaaaacctttctttaggtatcatatcctgaattttaacattaagtataagggatttatggactgcttgaatattagaaacattgttctatctct

SEQ ID NO: 25027 - DNA, 201 bp, Homo sapiens
atggtaattttacacattatgtgtaaacaaagtattggtggcatcacatggtaaaaactcagtaatttcacctcagaaattcttcttcacatcagaaatgkagtttgtgcattgaggctatctgattgatgtttatgcctctctgcttgggatatattcatgagaataaataatagaaacctctcccaatgaatgcagtct

SEQ ID NO: 25028 - DNA, 201 bp, Homo sapiens
agaaaatatggaaattttgcttcacatgattcctgtgatgaaaattaatgaattaaccccaaatgcccaactttatgttgtactgtgtagattttatattktaacattctaatggccgtgttttctggttggtaaaagctagacaaatcccgagcagtatagagaaatcctgttatgatttagtcttaagctatttaaaat

SEQ ID NO: 25029 - DNA, 201 bp, Homo sapiens
tgccctcctaggacaagcagtgcatgagcagcagctcagagaatgaaaaccctcctttcattttcatcaggggctgcatggttatccctctcagtgcaatrtagctaaaggggcttgaaatgctgggagtagtcttaaacagcccattcttgaaaggttttcattaactcactctaaacatctaaattaaaaatgtttttg

SEQ ID NO: 25030 - DNA, 201 bp, Homo sapiens
tccccacccaagtctcatcttgaattgtagctcccataatccccatgtcatggaagtgacctggtgggaggtaattgaatcatgggggtgggtcttttctrtgctgttctcgtgacagtgaataagtctcatgagatctgatggtttcataaaggggcgttccagcttcatccatgtgcctttttgcaaaaaaaaaaatat

SEQ ID NO: 25031 - DNA, 201 bp, Homo sapiens
gatggttagttaataaatagcagagtcaggaattaaacttagatattcttgctcccaaggtcctgctctttctatgccatacccccttcccctaccctctrcccacgtacgtctaattatcctcaagttcaaggagataggaatatgtgctttgtggggagacatatgtttcatggtcaaataatcttagaaaattctggg

SEQ ID NO: 25032 - DNA, 201 bp, Homo sapiens
gtggcaatgccgccagcagtgtcagccctataaccacagataagaactcttcagagactgtattttggtgacatgcaattgtgggttttaggggtaggtartggacacaaatctcatattttacaggatgtaagtcaatctagttcataagaaaaattgagttactttatataaaatttgatctctatttatccttgtctg

SEQ ID NO: 25033 - DNA, 201 bp, Homo sapiens
ttgactacataaatgaagaaattgaggctcagatacattaagtaattctcccagggtcacacagctagaactggcaaagcctgggattgatccatgatctkccagcattgaagaatcataaatgtaaataactgcaaggccttttcctcagaagagctcctggtgcttgcaccaacccactagcacttgttctctacaggg

SEQ ID NO: 25034 - DNA, 201 bp, Homo sapiens
tggaaagaaactaaaataaaagtccaggtcacttaaccatacagggctgatgttagatgaaagcaagcatcgataccaaatgcaattttacataatattasctgtcaacaaaatatatttggacagccgcatggtaattttacacattatgtgtaaacaaagtattggtggcatcacatggtaaaaactcagtaatttcac

SEQ ID NO: 25035 - DNA, 201 bp, Homo sapiens
gcttgatgatttaacctcacgctccctactacctgggtggagcctgacatacaggccactacccacacctctgtgcatgtgcttgaactcaatttctggtrtcagatgggtctgggtttgaatccctgctctaccacttaccagctctggggccatgcaagttatttggcttatctgatcctccatttcctcatctgtaaa

SEQ ID NO: 25036 - DNA, 201 bp, Homo sapiens
ttctattttatatgttcatcttctgtctttgaaagttcaagaaacaagggctctgatacctgatttggttagtgtttgaaggttgccaagctgcgttgcakgtaataatttgggcttaggtaacgtggattgtcataaaatgcatgtaagcatgggttagtgctgaggaatagaatattgaaagtcaccagaattcagtat

SEQ ID NO: 25037 - DNA, 201 bp, Homo sapiens
gtgccacacactttgaaataaccagatttcatgtgaactcggaagaagagctcacttatcaccaaggagatgtcctaagccattcatgagagatccacccmcgtgatccaaacacctcctaccaggccccacctccaacacgggggattacatctcaacatgagatttggaggagatatccaaactatactaaattcttta

SEQ ID NO: 25038 - DNA, 201 bp, Homo sapiens
ctagtgtgctactatcatttaaggcccttcatgactgtggggtgtaatccattcctactcactcttaatagattctgacctatacaggcagaaaggtagtrtgggagagacctctgggaccataagatcaacacctcccactttagactcttctctacaacagccctaggagactacaccagccttagcttgactccttcc

SEQ ID NO: 25039 - DNA, 201 bp, Homo sapiens
ccttcctgcactacttccttcctgcactacttccttcctgtattacttcctttctgtactacttcctttctgtactacttccatgctcacattcctgaagsctaagaaaagtgtcctaaagcctaactgaccagggctggaaaacttggccaccaagatatgcagcaaattattaagtctcctaatttttcccactatgaa

SEQ ID NO: 25040 - DNA, 201 bp, Homo sapiens
taccattcaggacataggcatgggcaaggacttcatgtctaaaacaccaaaagcaatggcaacaaaagccaaaattgacaaatgggatctaattaaactamagagcttctgcacagcaaaagaaactaccatcagagtgaacaggcaacctacaaaatgggagaaaattatcttaaattttttaacaattcagtccacaca

SEQ ID NO: 25041 - DNA, 201 bp, Homo sapiens
gatgagggcttatatctttgagaaatgagagggtcacctggtatcttagtccattttcacattgctataaagacatacccaagactgggtaatttataaaraaaagaggtttaatttactcacagttctgcatggctggggaggcctcaagaaacttaaactcatggcaaaaggggaagaggcgtgtcttacatggcagca

SEQ ID NO: 25042 - DNA, 201 bp, Homo sapiens
cttctactcaaaagatatcctggtttctgaacattctgaataacacttaaacaagaatcttgactatgtaaaaaaacaggaagagttaagattaaaaaaamaaaaaaaaaaaaaaacttctacatctttttaccactaagacttttgttcttttcccctttggtcctaatgtttaaaaaatgttgtcaaccaaattgtttt

SEQ ID NO: 25043 - DNA, 201 bp, Homo sapiens
gcatctgtcactgcacttaccaccagtcttgtaggtgttgataggcttgtctctgttccacctttcagtagactgttagtgccatgaggaagaccctgggygtgccagccttgtgcacacactctgagcatctaatagacacaaaaagaagtgggataaggaggatggtatatgggcattctctgtattatctctgcaaat

SEQ ID NO: 25044 - DNA, 201 bp, Homo sapiens
cgaatgtgcttactgaagaatttctaaatccatggctccctctggcggtcctgccaagaacatgacacaattaggacacaattggcatctaacagacaagyctgtgtccctgctgaacaagaaactaggccatggtagaacatccaggctctgtcctaccgcactaacgactgcactaatgatgacattaatgaccattct

SEQ ID NO: 25045 - DNA, 201 bp, Homo sapiens
agtcactcagagaaagacttgcggggcatttgactgggctgtccatgttgtggctgcaacatgagaggctcacagacgtttctggaatggacagttaaccrtatgaaaaagtacagatgttgcgccatagggctctgaaaagggagggccccttagtttttatttctcaagaggaaaacaaagctaacaacttaagccaaa

SEQ ID NO: 25046 - DNA, 201 bp, Homo sapiens
gtgacggactggagttgagttagaatggacacggctgaacccagccctaaaagatcttcttctagtgttcaaaataagcccttgatctcatatttctagcagaacttttttctactgttttcctcttcctgttctttactttttttcatcttccccgagccctgtcccacctcacctctcctatcacatgccctgttttct

SEQ ID NO: 25047 - DNA, 201 bp, Homo sapiens
cttcttctagtgttcaaaataagcccttgatctcatatttctagcagaacttttttctactgttttcctcttcctgttctttactttttttcatcttcccygagccctgtcccacctcacctctcctatcacatgccctgttttctctttttaaataagaggctcggaaattccctctcccccaaggcttccctctacttg

SEQ ID NO: 25048 - DNA, 201 bp, Homo sapiens
acggggtaagcctccacccgggcaggagagggctcaccagaggtaggagggtccagatgcccagcatggttgttgagcaatcctccgaagtgaaagagctyccccaactccgtactgagcgggtccaccaacccgcgggagaagaggcagctccgcctgggcagccagggctggcctcagggtgtgttccgtgccagtgcc

SEQ ID NO: 25049 - DNA, 201 bp, Homo sapiens
attatattgactacataaatgaagaaattgaggctcagatacattaagtaattctcccagggtcacacagctagaactggcaaagcctgggattgatccaygatcttccagcattgaagaatcataaatgtaaataactgcaaggccttttcctcagaagagctcctggtgcttgcaccaacccactagcacttgttctct

SEQ ID NO: 25050 - DNA, 201 bp, Homo sapiens
ttcctagttggccattacaggatcatgggcatgtagctttacagttttctgatccctttcctaagataagacttgtgtaccgtgtcttaagtgtctgctaygatcttaatatgtctcccaaaattcatgtgttgggaacttaaaccctagggcaacagtgttgagagatgaggcctaatgggaggtgtttaattgataagg

SEQ ID NO: 25051 - DNA, 201 bp, Homo sapiens
gcatctgcccattaccctagctcagtgtctctgggcatttctgcagttgttctgaaggcttggcgtgtttatctcccacaggcggctgaaccgcctcccgyttcatgagcagaccagtggaatgcagtggaagagacccaggcctccggccacccagattagagagttttgtgctgaggtccctatatggttgtgttagac

SEQ ID NO: 25052 - DNA, 201 bp, Homo sapiens
ccgaactgctcattcaggttagagaggagctgtaaaccactgagctgactctttccggggacacagtgacttcttcaatgacagtgctccttttggacatyataacattcttcctagattttctttttctttttcttttttttttggccaagtaaaaaacatttttctgcattcttgctgatgctgagggccagtctcctt

SEQ ID NO: 25053 - DNA, 201 bp, Homo sapiens
ccagggctgttttcccatccattgtgggacgtcccagacatcaggtgaggaaaattatgattggaacataacaggacacagattaggttcctctgtgttcmtgtttatccccagattgtctatctctttctgcccagaagttatgtaaccttgttacaaatagacctctaatgattaaggtccaggagtaaatgccaattt

SEQ ID NO: 25054 - DNA, 201 bp, Homo sapiens
taaagcctagtaccttttcattgaaacctagcaaacaccatcagagaataaggacaaagggaagactgcatagaatgtcagaactagaagaaaactgagasgtgaattagcacaaagtcttcattttaggaaagattattgagattcagagatgtaaagatcttgtcctctttcataatagcatcttgatggcaaagtcag

SEQ ID NO: 25055 - DNA, 201 bp, Homo sapiens
attaatgaccattctttttcatcttgactgacagatcattgcccctccggagcgcaaatactctgtctggatcggtggctccatcctggcctctctgtccmccttccagcagatgtggatcagcaaacaggaatacgatgaagccgggccttccattgtccaccgcaaatgcttctaaaacactttcctgctcctctctgt

SEQ ID NO: 25056 - DNA, 201 bp, Homo sapiens
tcttaactatttgatgtgagtggttcttttagtcagggttctctagagaaatagaaccaagagaatgaataaatggaaagatagataggagttggctcacrtgattgtagaggctggcaagtccaaaactttagcattggccaacaggctggagacccatgaaaaagttatagttcaagtccaaaggccgtctgctggcat

SEQ ID NO: 25057 - DNA, 201 bp, Homo sapiens
cacaatgtccccatctatgagggctatgccttgccccatgccatcatgcgtctggatctggctggccgagatctcactgactacctcatgaagatcctgastgagcgtggctattccttcgttactactggtgaggcctgtgggagataagggggagaggggagcagtgtgttgctcagtaacttccaggaccatcctcac

SEQ ID NO: 25058 - DNA, 201 bp, Homo sapiens
acaacagcatcatgaagtgtgatattgacatcaggaaggacctctatgctaacaatgtcctatcagggggcaccactatgtaccctggcattgccgaccgratgcagaaggagatcacggccctagcacccagcaccatgaagatcaaggtactgttcagtgacagacccagtggcaatgccgccagcagtgtcagcccta

SEQ ID NO: 25059 - DNA, 201 bp, Homo sapiens
aggcttattttatgctccaaatttgaggcttgagacttgaaccctgccaatgttaaagtctccacttgcaatatgaagttgaataattgcattcctcctckgctccctacaaagaatcccaagatgcctctaaaaggttcctagagcctcagatataattaatagcctagaacttcagagagcagaagtctgaaaggtctc

SEQ ID NO: 25060 - DNA, 201 bp, Homo sapiens
agttaaagcttctactcaaaagatatcctggtttctgaacattctgaataacacttaaacaagaatcttgactatgtaaaaaaacaggaagagttaagatwaaaaaaaaaaaaaaaaaaaaaaacttctacatctttttaccactaagacttttgttcttttcccctttggtcctaatgtttaaaaaatgttgtcaaccaa

SEQ ID NO: 25061 - DNA, 201 bp, Homo sapiens
aagttcaaggagataggaatatgtgctttgtggggagacatatgtttcatggtcaaataatcttagaaaattctgggttactttaatttgaaaactttctkaatccaaaacttctcagggcccttagtatgctaatgtcaaagggttgggtaattatatatactgttccccaaacttctttgcctttggaatcctttgaag

SEQ ID NO: 25062 - DNA, 201 bp, Homo sapiens
attatcttcacaacttttctattctaatatgaaaagtttattttggaaaattgactctaaggtcttctccagggattgtaatttaggaggtgtttttaagrggaaagagagtcagctttgcatattattaatacactcctctgttgattctgatgcagtcaattcgtaggccatattttgggatccctggtctattctgaa

SEQ ID NO: 25063 - DNA, 201 bp, Homo sapiens
gtctaattatcctcaagttcaaggagataggaatatgtgctttgtggggagacatatgtttcatggtcaaataatcttagaaaattctgggttactttaayttgaaaactttcttaatccaaaacttctcagggcccttagtatgctaatgtcaaagggttgggtaattatatatactgttccccaaacttctttgccttt

SEQ ID NO: 25064 - DNA, 201 bp, Homo sapiens
gagatgttaatattaggggaaactaggtgtagggtacatgagaactctctgtattatcttcacaacttttctattctaatatgaaaagtttattttggaarattgactctaaggtcttctccagggattgtaatttaggaggtgtttttaaggggaaagagagtcagctttgcatattattaatacactcctctgttgatt

SEQ ID NO: 25065 - DNA, 201 bp, Homo sapiens
aaaaatgtcttgactaaataaaataaggtgagtgtaaaaaatttaaaattctcatgagattctagtcatccctttcctagtaagtcagacttactcctgasgagtaagaaataaactactttattcatcttattatctatgtaataagtactatacttggggacatggtaggcattaaataaatgtaagttccattcccct

SEQ ID NO: 25066 - DNA, 201 bp, Homo sapiens
ttattttaccagcatattcctgagagtcctcaggccttcaagggcaaagaaataaaattttaataatagaatttcaggcactccaacagatgttggagatrttttggacaaccatccttattcaaaccataccatataagttaaagcttctactcaaaagatatcctggtttctgaacattctgaataacacttaaacaag

SEQ ID NO: 25067 - DNA, 201 bp, Homo sapiens
gttaaagcttctactcaaaagatatcctggtttctgaacattctgaataacacttaaacaagaatcttgactatgtaaaaaaacaggaagagttaagattaaaaaaaaaaaaaaaaaaaaaaacttctacatctttttaccactaagacttttgttcttttcccctttggtcctaatgtttaaaaaatgttgtcaaccaaa

SEQ ID NO: 25068 - DNA, 201 bp, Homo sapiens
ggttgaatgtccttcttcctacctcctagcattcactacctctctgagttgtgagtagctagaaccagacctattcaggtagtctcagcactaactgaacrccctcctcaacaagcaggggcctaagctcctatgaagctggataaaagtgaaatggaagtcagaaaagggcacagcaatttgctgcattcaaaaggaact

SEQ ID NO: 25069 - DNA, 201 bp, Homo sapiens
tatctaccgtttcccccatccagcctctctctccctccctacagtgttcccttcccaggatatgatgcgtctcccactctgcccaccccactgcttgtggyactgttaacaaagcagctgttggattgaattgggaaatgtccctgttttgaccttggttcttcctctgtcctaggatcatacctcttcaatttgccttcc

SEQ ID NO: 25070 - DNA, 201 bp, Homo sapiens
aagagaggcctggctcagagagcatggaccacatcagccttttgaagttcccttagtgtattaaagcaaaacaaaaatcaacacaatattgaaccagtttkcaaacactgggatatcttatgttttcatatagcaaatagatgcatttaatacttagaacttaaatgcagaatcacatttggtgctagtgtcatttgccac

SEQ ID NO: 25071 - DNA, 201 bp, Homo sapiens
gaagagttacaggtgagaaaaacgaatgtgcttactgaagaatttctaaatccatggctccctctggcggtcctgccaagaacatgacacaattaggacamaattggcatctaacagacaagcctgtgtccctgctgaacaagaaactaggccatggtagaacatccaggctctgtcctaccgcactaacgactgcactaa

SEQ ID NO: 25072 - DNA, 201 bp, Homo sapiens
gtggctccatcctggcctctctgtccaccttccagcagatgtggatcagcaaacaggaatacgatgaagccgggccttccattgtccaccgcaaatgcttytaaaacactttcctgctcctctctgtctctagcacacaactgtgaatgtcctgtggaattatgccttcagttcttttccaaatcattcctagccaaagct

SEQ ID NO: 25073 - DNA, 201 bp, Homo sapiens
cagcatggttgttgagcaatcctccgaagtgaaagagcttccccaactccgtactgagcgggtccaccaacccgcgggagaagaggcagctccgcctgggyagccagggctggcctcagggtgtgttccgtgccagtgcccgcccctgaggctccagccaagtcactcgtaaaccgcttccctcactccccagaagcgtct

SEQ ID NO: 25074 - DNA, 201 bp, Homo sapiens
tctgtctggatcggtggctccatcctggcctctctgtccaccttccagcagatgtggatcagcaaacaggaatacgatgaagccgggccttccattgtccmccgcaaatgcttctaaaacactttcctgctcctctctgtctctagcacacaactgtgaatgtcctgtggaattatgccttcagttcttttccaaatcatt

SEQ ID NO: 25075 - DNA, 201 bp, Homo sapiens
ctagactgaaacatgcacactttctctctccatgataggctctggctagtcctgccctaaaagacttcagcatgagagaagagagactgttttccaacagsgtttgtgtttcttggatgccattctgatcagctcttaccccccttacttccacacaagagggaggtgaatgaagccagtagctgggctcactactgagtt

SEQ ID NO: 25076 - DNA, 201 bp, Homo sapiens
gtgtgatattgacatcaggaaggacctctatgctaacaatgtcctatcagggggcaccactatgtaccctggcattgccgaccgaatgcagaaggagatcrcggccctagcacccagcaccatgaagatcaaggtactgttcagtgacagacccagtggcaatgccgccagcagtgtcagccctataaccacagataagaa

SEQ ID NO: 25077 - DNA, 201 bp, Homo sapiens
ccacccaccccaaaaaatgttatggtacaaaaggatccgctactgtgtgcctttctctagctagctcattttattcttgttatgcatttcccagacaatgyatgctgagggcctactatgcatgagacactgtcctaggaacagaggtggttccctggtggccctactacgtcattatcattgtggattttggattgcaga

SEQ ID NO: 25078 - DNA, 201 bp, Homo sapiens
ctctttttaaataagaggctcggaaattccctctcccccaaggcttccctctacttgtccagcaagtaaccacatgccagctgccatggtgacttatcacrcccaattgtctcccaggcatcgtgctggactctggagatggtgtcacccacaatgtccccatctatgagggctatgccttgccccatgccatcatgcgtc

SEQ ID NO: 25079 - DNA, 201 bp, Homo sapiens
ggcctcctctgcccagaacaggtcaggcccctctgcatccatcaaccaggtgtgctctcctgaccattctttgtcagatgggcaccttcactaactcagcyctttggattgctttgcagattatgtttgagactttcaatgtcccagccatgtatgtggctatccaggcggtgctgtctctctatgcctctggacgcacaa

SEQ ID NO: 25080 - DNA, 201 bp, Homo sapiens
tagctcattttattcttgttatgcatttcccagacaatgcatgctgagggcctactatgcatgagacactgtcctaggaacagaggtggttccctggtggycctactacgtcattatcattgtggattttggattgcagaatattgaactgacacattttttgatggcacatgtcttgagggagagactgcagtagggcag

SEQ ID NO: 25081 - DNA, 201 bp, Homo sapiens
attttatgtgtggcccaagacaattcttagtcttccaatgtggcccagggaagctaaaagattggacacccctgtattacacattatattatcactataaytaattgataatagtaatgtatggttgggtcctaatcgggatgggacataagattcagtggctgggtcatttgaccttgcctcaaacttgaaagagacatc

SEQ ID NO: 25082 - DNA, 201 bp, Homo sapiens
ataaatttagcaatcttttcctcacaaaccttaaaatagccaagcattcaaagatttggaaaatgtagaggcagtatcattgtttgctcttgcttgagagtttttttttttttaatcgttgacagcattctggtttcactttcacttcagtgggtaatttaatgtgatactaatacaacctgtaataacagttaaatgcat

SEQ ID NO: 25083 - DNA, 201 bp, Homo sapiens
ttattttcttaaattccgggtcatattgactaagatcataatacagtgagataagggaactctttcttgcactgggtaagtctgctaagtaagaatttttrctgtttatgttcactcctctaagaatcatagctcacatagccatgcaaattggattgaaataaagataatctaattaagacagtgtggccataactccac

SEQ ID NO: 25084 - DNA, 201 bp, Homo sapiens
ttcctcacaaaccttaaaatagccaagcattcaaagatttggaaaatgtagaggcagtatcattgtttgctcttgcttgagagtttttttttttttaatcrttgacagcattctggtttcactttcacttcagtgggtaatttaatgtgatactaatacaacctgtaataacagttaaatgcatggagcacgaactacatg

SEQ ID NO: 25085 - DNA, 201 bp, Homo sapiens
gctttggttcagtagcagaaatgaatatgggtgttattcaaatgtctgtaaattaatgagggccctttgaggttagttcagcttaagcattttgaatctgmagaatgaatggtctatgttaaagatgcttttggggaatgggaagtggtgacaaacacaacattgcatcccaaacagagccaaggtgacagggtacctggc

SEQ ID NO: 25086 - DNA, 201 bp, Homo sapiens
tctataaatctgctctccattctgttctctgaggacataagcctgggatcctataatctaacaagaaaaagctatgataatattgatgaagatcattcctyactattcttctgtatttttgagacttcagtatcacattcccttcttaccctctgtccaagtgcttctgtgtggctcttgtttaaatgcagatctctaggc

SEQ ID NO: 25087 - DNA, 201 bp, Homo sapiens
accaaagagtcaagccaaatgaaattccacccacgttagtcagggtatatttctgggtcctctcaatgtctggtttagttctagttttaaaatttaagaaraatttaaagctctggagacatgtatttatgtaaatacacaaaacagaggcagggcacagtggctcatgtctgtaatcccagcactttgagaggtccaggc

SEQ ID NO: 25088 - DNA, 201 bp, Homo sapiens
ttcaccaaagagtcaagccaaatgaaattccacccacgttagtcagggtatatttctgggtcctctcaatgtctggtttagttctagttttaaaatttaaraagaatttaaagctctggagacatgtatttatgtaaatacacaaaacagaggcagggcacagtggctcatgtctgtaatcccagcactttgagaggtcca

SEQ ID NO: 25089 - DNA, 201 bp, Homo sapiens
tcattcgttcattcattcattcaacataaaggccttggcagagtttacaatttaacaacatccttgcaagagatatttactgagcccctcctatcccttargcactgtgctagatactgggatatgatggtgaacaatcagtgtcccttccctaggctggtgaggaagatgtatacgaatgaaataattgtatcaaatgta

SEQ ID NO: 25090 - DNA, 201 bp, Homo sapiens
ctgaaccccaaggccaaccgggagaaaatgactcaagtaagtatgctaccccagcacacaacactgtggggtctggggaaacttctgttagaaggaggctrtgcagcacagcagagagaaggccggagctaggagtccaccaacagactaacagccttcagtgaactcagggatcccaaaggacaggaacagcttgaaagt

SEQ ID NO: 25091 - DNA, 201 bp, Homo sapiens
aaaatgactcaagtaagtatgctaccccagcacacaacactgtggggtctggggaaacttctgttagaaggaggctatgcagcacagcagagagaaggccrgagctaggagtccaccaacagactaacagccttcagtgaactcagggatcccaaaggacaggaacagcttgaaagtacttgcatccttcctgcagggacc

SEQ ID NO: 25092 - DNA, 201 bp, Homo sapiens
ccagggctggaaaacttggccaccaagatatgcagcaaattattaagtctcctaatttttcccactatgaaaactggtatactaacctacctcttgagcartgactgaaaaagacaatgcattaaagaatgtttagactgtggcaactaaaaagcagacagcaattgggttagtagggtgaaaacatctgttctgtgggcc

SEQ ID NO: 25093 - DNA, 201 bp, Homo sapiens
tgacttcacaagacaaattgataatttgggggtcacagttcagatgaaaaaaagtaagttaaatggcttacaaccacttttcctgtactacttccttcctycactacttccttcctatacttcttccttcctgcactacttccttcctgtaccacttccttcctgtaccacttccttcctgcactacttccttcctgcact

SEQ ID NO: 25094 - DNA, 201 bp, Homo sapiens
tagattttgtcctgatttttgataggaggatcaaaaccatggcatttatgctgttctcgccccatctctcaggttatgtagacttgttaaaaaaaaaaagkcatcattaacaattaaaagagagggagagtgagagagaacagccctagtgtgagactctcacattctctttccccatacttcattagggttattgctgcc

SEQ ID NO: 25095 - DNA, 201 bp, Homo sapiens
tatagacattgtcacctcctggagaacatattatttcctacaggattaaagaaatgacatatgcaaagcacctagtacacacaataaatactaatttttamttttacattgcttttcctaaatgaagtgacttcacaagacaaattgataatttgggggtcacagttcagatgaaaaaaagtaagttaaatggcttacaac

SEQ ID NO: 25096 - DNA, 201 bp, Homo sapiens
catataagttaaagcttctactcaaaagatatcctggtttctgaacattctgaataacacttaaacaagaatcttgactatgtaaaaaaacaggaagagtwaagattaaaaaaaaaaaaaaaaaaaaaaacttctacatctttttaccactaagacttttgttcttttcccctttggtcctaatgtttaaaaaatgttgtc

SEQ ID NO: 25097 - DNA, 201 bp, Homo sapiens
atgctgaaagatcaaggttggtagagctatccaagttctggatgcatttggttcttaaattgaaccctggaccacccaaagttacccaactctacaaattyttagtttctgcttaagctagattcttacaactgaaaaaatcttaactgataaattatcagaactttgatcagtataataattcttttgttacaaaagtta

SEQ ID NO: 25098 - DNA, 201 bp, Homo sapiens
ttaaagcttctactcaaaagatatcctggtttctgaacattctgaataacacttaaacaagaatcttgactatgtaaaaaaacaggaagagttaagattaaaaaaaaaaaaaaaaaaaaaaacttctacatctttttaccactaagacttttgttcttttcccctttggtcctaatgtttaaaaaatgttgtcaaccaaat

SEQ ID NO: 25099 - DNA, 201 bp, Homo sapiens
taaagcttctactcaaaagatatcctggtttctgaacattctgaataacacttaaacaagaatcttgactatgtaaaaaaacaggaagagttaagattaaaaaaaaaaaaaaaaaaaaaaacttctacatctttttaccactaagacttttgttcttttcccctttggtcctaatgtttaaaaaatgttgtcaaccaaatt

SEQ ID NO: 25100 - DNA, 201 bp, Homo sapiens
agcttctactcaaaagatatcctggtttctgaacattctgaataacacttaaacaagaatcttgactatgtaaaaaaacaggaagagttaagattaaaaamaaaaaaaaaaaaaaaaacttctacatctttttaccactaagacttttgttcttttcccctttggtcctaatgtttaaaaaatgttgtcaaccaaattgtt

SEQ ID NO: 25101 - DNA, 201 bp, Homo sapiens
agctggcatcctctgtggaatgtgcaaaccatgcctgcatctgcccattaccctagctcagtgtctctgggcatttctgcagttgttctgaaggcttggcstgtttatctcccacaggcggctgaaccgcctcccgtttcatgagcagaccagtggaatgcagtggaagagacccaggcctccggccacccagattagaga

SEQ ID NO: 25102 - DNA, 201 bp, Homo sapiens
aaacagtcaactcatgctgagaggaaaccacactgagaggaaaccatgctgaaagatcaaggttggtagagctatccaagttctggatgcatttggttctkaaattgaaccctggaccacccaaagttacccaactctacaaattcttagtttctgcttaagctagattcttacaactgaaaaaatcttaactgataaatt

SEQ ID NO: 25103 - DNA, 201 bp, Homo sapiens
tcacggccctagcacccagcaccatgaagatcaaggtactgttcagtgacagacccagtggcaatgccgccagcagtgtcagccctataaccacagataaraactcttcagagactgtattttggtgacatgcaattgtgggttttaggggtaggtaatggacacaaatctcatattttacaggatgtaagtcaatctagt

SEQ ID NO: 25104 - DNA, 201 bp, Homo sapiens; identical to SEQ ID NO: 16978

SEQ ID NO: 25105 - DNA, 201 bp, Homo sapiens; identical to SEQ ID NO: 16980

SEQ ID NO: 25106 - DNA, 201 bp, Homo sapiens; identical to SEQ ID NO: 16957

SEQ ID NO: 25107 - DNA, 201 bp, Homo sapiens
ccgctggtgaccggttacttgggaaggggtcctggcctgaagacagtgtgtgcggcaagaacgcaagggggcaagtcccagaagtaacgccactgctcggrggaaggagcatggggcaggagggcccggctgcttctccaggcccctgcggggggctgcttcggaggaactgcagggcagcctggcccggaggcctccctg

SEQ ID NO: 25108 - DNA, 201 bp, Homo sapiens
cagggtttcaccatgttggccaggctggtcttgaactcctgacctcaggtgatccacccatctcagcctcccaaagtgccatgattacaggcgtgagccaycgcactcggctgccaacaagtattcttaaacctcagccacaagttatttgttatttatttacttcttacctaattgggctgaattttttttttggagacg

SEQ ID NO: 25109 - DNA, 201 bp, Homo sapiens
  misc_feature (1)...(201): n = A,T,C or G, or insertion/deletion polymorphism (see Tables 1-2)
tttctcccccgatgagtccaatccatgactgcctttaactctgtggcttccttcccctagaggaaagccagaaattgtgggaagcaatttagacacactgntgagcatagggctggatgagaagtttccacaggactacaggctggcccagcaggtgtgccatgccattgccaacatctcggacaggagaaaggtatgtgg

SEQ ID NO: 25110 - DNA, 201 bp, Homo sapiens
gaaggagctaaatggacgctaaataaagagagtgtttcaaaaacaaaagagaggtcaactgcagattaactactggatttattgatgtcatagtcactggyaaccttgacaaagctgtttcaggagatggtgggggcaaaagcctgctaggaataggtttttaagaaaatggaatgacagagattagagatgatgaattta

SEQ ID NO: 25111 - DNA, 201 bp, Homo sapiens
tatcccgccactcccaggagcttccagctatcctggatgatacaactttgagtggatcagatagaaacgcccatctaaatgccctcaaaatgaactgttaygctctgatacgtctcctggaatcctttgagaccatggccagccagacaaaccttgtggacctggaccttggtgggaaggtaatttggagttttgggctca

SEQ ID NO: 25112 - DNA, 201 bp, Homo sapiens
taaatatccaggaatgttgacagctgttggattcccctgtatccccttgaacgaaaccatcctgtacttctctaactccttaggcccagcagcttccacayaagaaaagaatccccgggagtctacaggaaacatggtcacaggacagactgtctgtaaaaataaacccaatatgtcggatcctgaggaatccaggggaaa

SEQ ID NO: 25113 - DNA, 201 bp, Homo sapiens
agaaggggctctgcaggctccttcctgtctcacccccacactttctttccctcatagtcactttcgaagtatagatcctggcctcaaagaagatactctgsaattcctgataaaaggtgtttatgggtcagggggtaggggatggaaggtgtttgttatcgtttgtttgtttgtctgtttgtttgtttttcctacattttg

SEQ ID NO: 25114 - DNA, 201 bp, Homo sapiens
gtttatgggtcagggggtaggggatggaaggtgtttgttatcgtttgtttgtttgtctgtttgtttgtttttcctacattttgtcagccacatgatgataycaaggctgttgtgattcagttggtttggctaagcccagggacctttggcctgttaaaggtctgtaatcttggtgggcgatacagagttatgtgtgttcac

SEQ ID NO: 25115 - DNA, 201 bp, Homo sapiens
tgaagcaatttggcttttcttgtaatgtcatgactcttttctgcttcttgggaacacttccagcatcactagtggcacttcattatgggtcccatggtgtyatgtaaggtttatgatactgctttagacacatgaaaaatacctgaggaaccacaggagatcacttcttgctgccatatgcaatttttgttttgagacaga

SEQ ID NO: 25116 - DNA, 201 bp, Homo sapiens
tccccttccggcaatctctgctcctctgctattacatgaagcgaagagtttctgcctctctgtggctactaccgtaggaaaggttcgtgtgaacaatgacraaactgtcagtgatcacccaggaaggaaagatttaggtaaatgcagagtgtggagttagagacctcagcataaaacagaggctttgtgtctgaggcaggg

SEQ ID NO: 25117 - DNA, 201 bp, Homo sapiens
gtgagcatagggctggatgagaagtttccacaggactacaggctggcccagcaggtgtgccatgccattgccaacatctcggacaggagaaaggtatgtgrgggtggttccaaactaaggagagtggagattctcgtgtccaccctgtacacacacccacgttgtcttgctctccacagccttctctgggcaaacgtcacc

SEQ ID NO: 25118 - DNA, 201 bp, Homo sapiens
ccacaaggtgagaggcagagaggcactgagggctggctgcagagggaatctgtaggtcacctcatctccttaacatggctctctctgtcttacagggcaaygcaatctataatctccttccagatatcatcagccgcctgtcagaccccgagctgggggtggaggaagagcctttccacaccatcatgaagtattgctccc

SEQ ID NO: 25119 - DNA, 201 bp, Homo sapiens
gcttaggaatcagacacacctgtatttgaattccacctcggctactctttagctgtacagccttcggcaataacttagcctctctttgtgcctatttcctyttcttttgaggctgatgatacttaacccttagttcttgaaaatattaaatacgataaagttcctaacatggtggcagacatacagtagcactcactccct

SEQ ID NO: 25120 - DNA, 201 bp, Homo sapiens; identical to SEQ ID NO: 13574

SEQ ID NO: 25121 - DNA, 201 bp, Homo sapiens
tcacttgaacctgggagccggaggttgtagtgagccgagatcgtgccactgcacttcagcctgggtgacagagcgagactccatctattttttttttttttaaaaaaagatggtgaaaccccgtctctactaaaaaatagaaaaattagctaggtgtggtggcaggcacctgtaatcccagctactcgggaggctgaggca

SEQ ID NO: 25122 - DNA, 201 bp, Homo sapiens; identical to SEQ ID NO: 13576

SEQ ID NO: 25123 - DNA, 201 bp, Homo sapiens
agtagagcttttacaggaatgctgatggattggattggattatagggttagtaaaggaatctgagatgagaatgattacaaggctttttttttttttttttgacagtcttgctctgttggctctgtcacccaggttggcgtgcagtggcgtgatcttggctcgctgcaacctctgcctcccaggttcaagcaattctcatg

SEQ ID NO: 25124 - DNA, 201 bp, Homo sapiens
cgtggcagagaacatcagagaagacgagtgctgggggagggtccagggttggtcttagtggatggcagagctggccctgggccatcgaacatcctcatctycccttcctgcagacagctcctctcctacatcaccaaggacaagcagacagagagcctggtggaaaagctgtgtcagcggttccgcacatcccggtatgct

SEQ ID NO: 25125 - DNA, 201 bp, Homo sapiens; identical to SEQ ID NO: 13577

SEQ ID NO: 25126 - DNA, 201 bp, Homo sapiens
agcttcactcttgtcgcccaggctggagcgcagtggttcaatctcggctcactgcagcctctacctcctgggttcaagcaattttcctgcctcagcctccygagtagctgggattacaggtgcccgccaccacaagctgatttttgtatttttaatagagacgggttttgccatgttggccaggctggtcttgaactccta

SEQ ID NO: 25127 - DNA, 201 bp, Homo sapiens
agagacgggttttgccatgttggccaggctggtcttgaactcctaacctcaggtgatctccctgctttggccccccaaagtgctgggattacaggtgtgarccaccacgcccagccagaagtctatttttaaaataagtaaaataagtttgatggaagaaggttgtgattttaaatcagctactctaggcccggtgcggtg

SEQ ID NO: 25128 - DNA, 201 bp, Homo sapiens
cacaagctgatttttgtatttttaatagagacgggttttgccatgttggccaggctggtcttgaactcctaacctcaggtgatctccctgctttggccccscaaagtgctgggattacaggtgtgagccaccacgcccagccagaagtctatttttaaaataagtaaaataagtttgatggaagaaggttgtgattttaaa

SEQ ID NO: 25129 - DNA, 201 bp, Homo sapiens
ccccacactttctttccctcatagtcactttcgaagtatagatcctggcctcaaagaagatactctggaattcctgataaaaggtgtttatgggtcagggrgtaggggatggaaggtgtttgttatcgtttgtttgtttgtctgtttgtttgtttttcctacattttgtcagccacatgatgatatcaaggctgttgtgat

SEQ ID NO: 25130 - DNA, 201 bp, Homo sapiens
aaagcaaagcaacttgttatagaaagtaatggctagaataaagaaaaccctgactttgggagcagtagggatagaatgaatgaggcagggctctgatacarttggatccagacagctgctttcatcatctcaaactcttcctttctcagtttggttactggctgttgctaccgccttctggagaatcccaccattaatcac

SEQ ID NO: 25131 - DNA, 201 bp, Homo sapiens
ctaccaggctcaagcagtcctcccacctcagcctcccaagtagctgggaccacagacatgtaccaaagtgctgggattgtaggcatgaggcaccatgctcrgccagacttttttgttaaaaactaaaacacctacacacattagcctaggcctacacagggtcaaggtcaccaagaagtcactagacgatgggaatttttc

SEQ ID NO: 25132 - DNA, 201 bp, Homo sapiens
tgtatatactatggttttttccctctacctgcctacctatggtaatgtttaatttacaaattagatacagtaagagattaacaacaattctttttttttttgagacggagtcttgctctgtcaccgggctggagtgcagtgctgtgatctcagctcactgcaacctccgcctcccaggttcaagagattcccctgcctcag

SEQ ID NO: 25133 - DNA, 201 bp, Homo sapiens
agccgcctgtcagaccccgagctgggggtggaggaagagcctttccacaccatcatgaagtattgctccccgggccctggggcacattttccacatagcaygggcttaggaatcagacacacctgtatttgaattccacctcggctactctttagctgtacagccttcggcaataacttagcctctctttgtgcctatttc

SEQ ID NO: 25134 - DNA, 201 bp, Homo sapiens
cagctactcagaaggctggggcaggaggatcgcttgaacccagaagtttgaggctgcagtaagctatgatcctgcactgcacttcggcctgcgcaacacarcaaaccctgtctcaaaaaaaattgtttacaaaggtgtttttgttgttgttgttgttgttgttgctttttttttgagacggagtctcactctgtcacccag

SEQ ID NO: 25135 - DNA, 201 bp, Homo sapiens
tttttttttgtggggggacagagcttcactcttgtcgcccaggctggagcgcagtggttcaatctcggctcactgcagcctctacctcctgggttcaagcrattttcctgcctcagcctcccgagtagctgggattacaggtgcccgccaccacaagctgatttttgtatttttaatagagacgggttttgccatgttggc

SEQ ID NO: 25136 - DNA, 201 bp, Homo sapiens
acgttgaatatatagatctggagttcaggagagaggtctgagctagagataacacatttgggaatataatagtattcagagccgtgagactgaatgaaatyaccaaatcagtaagtgtagctaaaagagcaggaatccaaggactggtaccctagggcactccagcattaagagtgaggatgccgggtgcatggctcacgc

SEQ ID NO: 25137 - DNA, 201 bp, Homo sapiens
taggaagtctgttcctgtcctccctgtgcagggtatcctgtagggtgacctggaattcgaattctgtttcccttgtaaaatatttgtctgtctcttttttwaaaaaaaaaaaaaggccgggcactgtggctcacgcctgtaatcccagcactttgcgataccaaggcgggtggataacctgaggtagggagttcgagacca

SEQ ID NO: 25138 - DNA, 201 bp, Homo sapiens
aggaagtctgttcctgtcctccctgtgcagggtatcctgtagggtgacctggaattcgaattctgtttcccttgtaaaatatttgtctgtctctttttttwaaaaaaaaaaaaggccgggcactgtggctcacgcctgtaatcccagcactttgcgataccaaggcgggtggataacctgaggtagggagttcgagaccag

SEQ ID NO: 25139 - DNA, 201 bp, Homo sapiens
tgcctctggatattgatatctctgatgagcatgtacccagcttgccaccgtatttattcagttgaacaatttcacgtgtatttttaaacattcgattccaygggttagatctgatctgttagaaggggctctgcaggctccttcctgtctcacccccacactttctttccctcatagtcactttcgaagtatagatcctgg

SEQ ID NO: 25140 - DNA, 201 bp, Homo sapiens
catagtctctaaaattaattatacaaagcttaaaaataaataatataaagaagaagatagtaggacctgtcatttcatgttggatcatcagagaaggcttkctgttacgtcacgtttgagcagagaccttaagaaagtaaggaaataaactatgcagattgttagggaagagcattccaagcaaacagaaaagcctatgca

SEQ ID NO: 25141 - DNA, 201 bp, Homo sapiens
ttgcagtaagtgaaacacccaactggtactttaaaaagaactggtgactgtttgtcctaactgtgcatgttagtcctgaaattccaagttataggttcacygataaatgcctctggatattgatatctctgatgagcatgtacccagcttgccaccgtatttattcagttgaacaatttcacgtgtatttttaaacattcg

SEQ ID NO: 25142 - DNA, 201 bp, Homo sapiens
gtaagtagacttggtccaccaaaagagaaggaattaaatggaaacagggatgaaattatgtcatttactgaccctgctattcattttacctgatagcttastgatgctgaccttgccggaccactgcagaaggagacccagaaattacaagagatgagggcccagaggcgaactgcagcagcttgtaagtagttactgcct

SEQ ID NO: 25143 - DNA, 201 bp, Homo sapiens
gtctagtaagagcaactcagctttgattttttttttttcttggaggtaggatctggctctgtcacccatgctggagcatgatcatagctcattgcagcctygatctcctgggctcaagcaatcctcccacctcagcctcccaagtagctgggacttcaggcacatactaccatgcctggctaatttttttagtttttgtag

SEQ ID NO: 25144 - DNA, 201 bp, Homo sapiens
gaaaagtggaggggtgaatcagtatgttgtgcaagaggtactgtccatcaaacatcttccaccacagcttagaggtaagagtccatagctgtcactgtacytagctctttcaaaggaccatctcacatggaattgctacattgtcatttctgttccactacaccaggaagcatcataagagcaagaaacatgtttttccta

SEQ ID NO: 25145 - DNA, 201 bp, Homo sapiens
aaatatctgccccaaagaggtctagaattcacatttttattatcagtagtaaaagtcttcctctaccaaggacgaggatatctggctccctttaaggactstaatgtgtcttaccactacaaggagtactcctaatctatattctgtagaaagggtttttagagtgagtgggtagctcagtttagagtatacttaaagatc

SEQ ID NO: 25146 - DNA, 201 bp, Homo sapiens
gttgaaaagtggaggggtgaatcagtatgttgtgcaagaggtactgtccatcaaacatcttccaccacagcttagaggtaagagtccatagctgtcactgkacttagctctttcaaaggaccatctcacatggaattgctacattgtcatttctgttccactacaccaggaagcatcataagagcaagaaacatgtttttc

SEQ ID NO: 25147 - DNA, 201 bp, Homo sapiens
agaggcagagaggcactgagggctggctgcagagggaatctgtaggtcacctcatctccttaacatggctctctctgtcttacagggcaatgcaatctatratctccttccagatatcatcagccgcctgtcagaccccgagctgggggtggaggaagagcctttccacaccatcatgaagtattgctccccgggccctgg

SEQ ID NO: 25148 - DNA, 201 bp, Homo sapiens; identical to SEQ ID NO: 13573

SEQ ID NO: 25149 - DNA, 201 bp, Homo sapiens
aacctcctcagttcaagcaattctcctgcctcagcctcctgagcagctgggattacaggcgcatgccaccacacctggcttttttttttttttttttttgkatttttattagagacggggtttcaccatgttggtcaggctggtctcgaactcctgacctgatgatccacctgcctcagcctacaaagtgttgggattaca

SEQ ID NO: 25150 - DNA, 201 bp, Homo sapiens
cacttgaacctgggagccggaggttgtagtgagccgagatcgtgccactgcacttcagcctgggtgacagagcgagactccatctattttttttttttttwaaaaaagatggtgaaaccccgtctctactaaaaaatagaaaaattagctaggtgtggtggcaggcacctgtaatcccagctactcgggaggctgaggcac

SEQ ID NO: 25151 - DNA, 201 bp, Homo sapiens
aatccaggggaaatgatgaactagtgaagcaggagatgctggtacagtatctgcaggatgcctacagcttctcccggaagattacagaggccattggcatmatcagcaagatgatgtatgaaaacacaactacaggtatgccagagtccctttctataaggacagccttggggttcttttggattttttaattttttaaat

SEQ ID NO: 25152 - DNA, 201 bp, Homo sapiens
tctactaaaaaatagaaaaattagctaggtgtggtggcaggcacctgtaatcccagctactcgggaggctgaggcactgaattgcttgaacccaggaggcrgaggttgcagtgagctaacatcatgccactgcactccagcctgggcgacagagcgagactccgtctcaaaaatatgtatatatatttgtgagggtggagc

SEQ ID NO: 25153 - DNA, 201 bp, Homo sapiens
aaagaaaaaattccagtatatttactgaaaaaaattagcatattagtggacctacacaattcaaatcgtattgttcgaagattaattgtagacatacatakgtgccttacttttctccagtgagagggcctaaaggcagtaatactctaatagaaatgagtgcaagtaatgcctagaatttggcttctacataccattatt

SEQ ID NO: 25154 - DNA, 201 bp, Homo sapiens
acgtcacccccccttccggctgcctcaggaacacaggttgtttgagcgactgcgggagacagtcacaaaaggtgagctctcagggaaggccttgggcagawttgggccctttgttgcagtaaacaacttctccctcctcctctgcaggctttgtccacccagacccactctggatcccattcaaagaggtggcagtgaccc

SEQ ID NO: 25155 - DNA, 201 bp, Homo sapiens
gccttacttttctccagtgagagggcctaaaggcagtaatactctaatagaaatgagtgcaagtaatgcctagaatttggcttctacataccattattccrtaatagccaggattccaccaagaatggttgattacaggactgggccagggaaaatacaagatgagcccagaacatcttttattttatttatttatttatt

SEQ ID NO: 25156 - DNA, 201 bp, Homo sapiens; identical to SEQ ID NO: 13579

SEQ ID NO: 25157 - DNA, 201 bp, Homo sapiens
tttgagaccatggccagccagacaaaccttgtggacctggaccttggtgggaaggtaatttggagttttgggctcacgttatatggggtctggggagatasgggaatagatggaaaagaagggaatccaatgatccacaaatcctttctgtcctcattgagaatttaggagaaagaactcaaaagtgtcacacgttttctt

SEQ ID NO: 25158 - DNA, 201 bp, Homo sapiens
caggagaatcgcctgaacccagaggcggaggttgtagtgagccgaaatcacaccattgcactccagcttgggcaacaatagcgaacctccatctcaaattwaaaaaaaaatgcctacacgctctttaaaatgcaaggctttctcttaaattagcctaactgaactgcgttgagctgcttcaactttggaatatatgtttgc

SEQ ID NO: 25159 - DNA, 201 bp, Homo sapiens
aggccagagagctgacagctgagagcaggtacgagggttaggccgtgaggccatgggagcagtggggagccagaccgcaggttcttgtgggccatcatggkgactttggcatttcctcagaatgaagtggagccactggggagccacaagcagggaggtgaggtgacctgacttgtacttcaacagggccatcctagctgt

SEQ ID NO: 25160 - DNA, 201 bp, Homo sapiens
tacgagcaatagcaaggaggccagagagctgacagctgagagcaggtacgagggttaggccgtgaggccatgggagcagtggggagccagaccgcaggttyttgtgggccatcatggtgactttggcatttcctcagaatgaagtggagccactggggagccacaagcagggaggtgaggtgacctgacttgtacttcaac

SEQ ID NO: 25161 - DNA, 201 bp, Homo sapiens
ttttccttaaggtagagcttacaggatttgctaacagactgggtgtgaggtgggagggagagttcagtcaaggatgactctcccgggttttggtctgagcrtttggaagactggagttaatggtaactgagatagggagaaggctgtgaataggtgttttgggaggaagatcagatgttctgttttggacatacaaagttt

SEQ ID NO: 25162 - DNA, 201 bp, Homo sapiens; identical to SEQ ID NO: 13584

SEQ ID NO: 25163 - DNA, 201 bp, Homo sapiens
ggagtcttgctctgtcaccgggctggagtgcagtgctgtgatctcagctcactgcaacctccgcctcccaggttcaagagattcccctgcctcagcctccygagtagccggaactacaggcgtgagccaccgcacccagctaattttttgtattttagtagagacgggtttcaccatgttggccaggatggtctcgatctc

SEQ ID NO: 25164 - DNA, 201 bp, Homo sapiens
tacagcgtgctaagtgttgttctgactggtttgcatggactatctcattcagttttgacatatatatatacatatatatatatatatatatatatacacayatatatataccattggtccttgaacaacgtgggggttagggatgacaacccctgtgcagtcaaaaatctgcatatgtaagttttgactgccccaaaactt

SEQ ID NO: 25165 - DNA, 201 bp, Homo sapiens
tctgtttgcttcctctagccacttacagcttatacattttaatgcatatagtatttcatgataaggcatcataggaggagtcgacattctcagggaaaatrcggaaggcctccatttgcatcttgctacattcagaaaggttctgtcgttaggtattgggggagttttgtgaagtagataggtgacatttgtacatgttct

SEQ ID NO: 25166 - DNA, 201 bp, Homo sapiens
catacagcgtgctaagtgttgttctgactggtttgcatggactatctcattcagttttgacatatatatatacatatatatatatatatatatatatacayacatatatataccattggtccttgaacaacgtgggggttagggatgacaacccctgtgcagtcaaaaatctgcatatgtaagttttgactgccccaaaac

SEQ ID NO: 25167 - DNA, 201 bp, Homo sapiens
accatacagcgtgctaagtgttgttctgactggtttgcatggactatctcattcagttttgacatatatatatacatatatatatatatatatatatatayacacatatatataccattggtccttgaacaacgtgggggttagggatgacaacccctgtgcagtcaaaaatctgcatatgtaagttttgactgccccaaa

SEQ ID NO: 25168 - DNA, 201 bp, Homo sapiens
gcacattcaaaccatacagcgtgctaagtgttgttctgactggtttgcatggactatctcattcagttttgacatatatatatacatatatatatatatakatatatatacacacatatatataccattggtccttgaacaacgtgggggttagggatgacaacccctgtgcagtcaaaaatctgcatatgtaagttttga

SEQ ID NO: 25169 - DNA, 201 bp, Homo sapiens
acctaaacacctcccattagactccaccttccaacactgtcatgttggggattatatttccaacacatgaattatgaggggcacattcaaaccatacagcrtgctaagtgttgttctgactggtttgcatggactatctcattcagttttgacatatatatatacatatatatatatatatatatatatacacacatatat

SEQ ID NO: 25170 - DNA, 201 bp, Homo sapiens
aaaaattagccgggtgtggtgacgcgtgcctgtaatcccagctactcaggaggctgaggcgggagaatcacttgaacctgggagccggaggttgtagtgasccgagatcgtgccactgcacttcagcctgggtgacagagcgagactccatctattttttttttttttaaaaaaagatggtgaaaccccgtctctactaaa

SEQ ID NO: 25171 - DNA, 201 bp, Homo sapiens
gtagtcatgagtttaacgtaagactagtcagcttgtttctgtgtttttctcaggccatttttatttgtgtggtcacatgaatggagtaaccagaaagttgrtttaacctagatttgccaggggagtatgtgttgttgttgttgttaattagtggaataagttacaagtatcacagtatctaacaataggggaatagtaaat

SEQ ID NO: 25172 - DNA, 201 bp, Homo sapiens
tatgttgggggtggggaactaacaaaaccagatgatgttactagcttgctataaaactaaaagccattatatatgttggggatgggaaagtaatagaaccrgatacgaagacaggtcttgaatatagaccctgactttttcactgtttggtttctagccctgtgagcctgtaggagtagaatggctccccaaatgtatgag

SEQ ID NO: 25173 - DNA, 201 bp, Homo sapiens
agcaacttgttatagaaagtaatggctagaataaagaaaaccctgactttgggagcagtagggatagaatgaatgaggcagggctctgatacagttggatycagacagctgctttcatcatctcaaactcttcctttctcagtttggttactggctgttgctaccgccttctggagaatcccaccattaatcaccagaaga

SEQ ID NO: 25174 - DNA, 201 bp, Homo sapiens
tcaagaccaagtgccaaagtcactactagaattagtttctagtccagggtcaatctcagatcccgtaagataatgttactagcttgctataaaactaaaarccattatatatgttgggggtggggaactaacaaaaccagatgatgttactagcttgctataaaactaaaagccattatatatgttggggatgggaaagta

SEQ ID NO: 25175 - DNA, 201 bp, Homo sapiens
agtgtgacccagtcttgggcaaaatacaataggcctagtaggtatatccctggggcgcgatgtgtgagaaactgtaagtctgacagatccgcaacggaagwtgttaagcaaatcgcttaacagatccgcaacggaagatgttaagcaaatcgcttaactttcttacttcaatttccgctctgtaaactcatttgtattatt

SEQ ID NO: 25176 - DNA, 201 bp, Homo sapiens
agcggggccctgcaggggagaaaggcccatccctcaccccttcaatgcccccactgtggcatccctgggactggggaggctgatggggaaggttgagcctytactagctggatctcccagttcctcacaaagcccttcctatctgcagaactgagcggcagcagcgagacctggcctactgtgtgtcacagctgcccctca

SEQ ID NO: 25177 - DNA, 201 bp, Homo sapiens
catccaaacacccagcagcgagcttccaaaaagaaacccaaagttgtcttctcaagtgatgagtccagtgaggaaggtatgatgctcccgcctgttcccgrccgagaaggcacacagctagggtgcagagggctggtttccataggacctgctgcgggggcctgagtgtagatgctctgccccactgccgcagaagggcct

SEQ ID NO: 25178 - DNA, 201 bp, Homo sapiens
caattctcgtgcctcagcctcccaagtagctgggaccacaggcgcgcaccaccacaccgcactaatttttttatttttagtagagacagggtttcaccatrttggccaggctggtcttgaactcctgacctcaggtgatccacccatctcagcctcccaaagtgccatgattacaggcgtgagccaccgcactcggctgcc

SEQ ID NO: 25179 - DNA, 201 bp, Homo sapiens
ggtagcctgaacaggtaaagggaagtgcctgcgtcctggggtgcttcagcccaggtgggattatgtctcctaagggacagaagcctggcctggagctggargaaagggaaaacaaagggaatgcaacatccttctgaatttctcaccattcagtgggcaatgcagagctcacagtgtgtgtgtgtgtgtgtgtgtgtgtgt

SEQ ID NO: 25180 - DNA, 201 bp, Homo sapiens
aggggttattggactggtccctcacctaggggacagggagaagagagatagtgtgtgtccccaaggaaaatatatccaccctcaaaataattcgatttgcygtaccaagtgccacaaaggtaggggcaagtggaaacggtgaatgccctcaggtctggggtgctgcttctttctctgcttcttccagttgttcttccctaa

SEQ ID NO: 25181 - DNA, 201 bp, Homo sapiens
gaaaacaaagggaatgcaacatccttctgaatttctcaccattcagtgggcaatgcagagctcacagtgtgtgtgtgtgtgtgtgtgtgtgtgtgtgtgtgagagagagagagagagagagagagaagtggggtaggggagtagggaagaatgatacaggagagactgtggcaaagcaaacaggattttgctgctctcaaa

SEQ ID NO: 25182 - DNA, 201 bp, Homo sapiens
aaaacaaagggaatgcaacatccttctgaatttctcaccattcagtgggcaatgcagagctcacagtgtgtgtgtgtgtgtgtgtgtgtgtgtgtgtgtgagagagagagagagagagagagagaagtggggtaggggagtagggaagaatgatacaggagagactgtggcaaagcaaacaggattttgctgctctcaaag

SEQ ID NO: 25183 - DNA, 201 bp, Homo sapiens
gaagatttaaaaagtgtgtaggacggatgggagcaggagagaggctagaagacacttgcaataacccaggtgtgaggcaacccaggaatgcggagaggacygagagatcacagggggaggcctcgcaagatgaactgacacatgggatggcggcagggatagggatggggccctggggagagagcgtggcaagttctcagc

SEQ ID NO: 25184 - DNA, 201 bp, Homo sapiens
gagcccaaatgggggagtgagaggccatagctgtctggcatgggcctctccaccgtgcctgacctgctgctgccactggtgagaccagggacaaagggaaragtgggctggtgggcgaggcaccttccggctggcgtgggccctctccgggagggggccgagcctctcctgcccgggcctggtcctggcgccagcctcagg

SEQ ID NO: 25185 - DNA, 201 bp, Homo sapiens
gaatcactggcttctactagagtggaagacagatgtatcattagatcgatcagttgatccatatttatctgctcccagtctggaggtctggttctgggagytgagaggacaccaggggaggataagacactttctgaccaagacattttttgatctctcatcttataaggttcgtggtcactttggggagatcatatctgt

SEQ ID NO: 25186 - DNA, 201 bp, Homo sapiens
caggagctagcagccgcctacttggtgctaacccctcgatgtacatagcttttctcagctgcctgcgcgccgccgacagtcagcgctgtgcgcgcggagaraggtgcgccgtgggctcaagagcctgagtgggtggtttgcgaggatgagggacgctatgcctcatgcccgttttgggtgtcctcaccagcaaggctgctc

SEQ ID NO: 25187 - DNA, 201 bp, Homo sapiens
actaaaaataaaaaaaaattagctgggcatggtggttcacggccgtagtcccagctattcaggaggctaaggtgggaggactgcttgagcgtgggtggtgragggtgcagtgattgcatcactgcactccagcctggacaacagagcaagatcctgcctaaaaaaaaaaaaatacagcttagatctggggcctactagctt

SEQ ID NO: 25188 - DNA, 201 bp, Homo sapiens
gcagtggcgcgatctcggctcactgcaacctctgcctcccagattcaagcaattctcctgcttcagcctcccaagtagctgggattacaggcacgtgccaycatgcctggctaatttttgtatttttagtagagatggggtttcaccatcttggtcaggctggtctcaaactcctggtgatccacctgcctctgcctccca

SEQ ID NO: 25189 - DNA, 201 bp, Homo sapiens
catggggctccttccttgtgttctcacccgcagcctaactctgcggccccattcacaggaacctacttgtacaatgactgtccaggcccggggcaggatayggactgcagggagtgtgagagcggctccttcaccgcttcagaaaaccacctcagacactgcctcagctgctccaaatgccgaaagggtgagtgtgcacag

SEQ ID NO: 25190 - DNA, 201 bp, Homo sapiens
gctccttccttgtgttctcacccgcagcctaactctgcggccccattcacaggaacctacttgtacaatgactgtccaggcccggggcaggatacggactkcagggagtgtgagagcggctccttcaccgcttcagaaaaccacctcagacactgcctcagctgctccaaatgccgaaagggtgagtgtgcacaggcagga

SEQ ID NO: 25191 - DNA, 201 bp, Homo sapiens
gctgttggtgggaatatacccctcaggggttattggactggtccctcacctaggggacagggagaagagagatagtgtgtgtccccaaggaaaatatatcyaccctcaaaataattcgatttgctgtaccaagtgccacaaaggtaggggcaagtggaaacggtgaatgccctcaggtctggggtgctgcttctttctctg

SEQ ID NO: 25192 - DNA, 201 bp, Homo sapiens
ttgtgttctcacccgcagcctaactctgcggccccattcacaggaacctacttgtacaatgactgtccaggcccggggcaggatacggactgcagggagtstgagagcggctccttcaccgcttcagaaaaccacctcagacactgcctcagctgctccaaatgccgaaagggtgagtgtgcacaggcaggagagtcaggc

SEQ ID NO: 25193 - DNA, 201 bp, Homo sapiens
atacagcatgctggcgacctggaggcggcgcacgccgcggcgcgaggccacgctggagctgctgggacgcgtgctccgcgacatggacctgctgggctgcytggaggacatcgaggaggcgctttgcggccccgccgccctcccgcccgcgcccagtcttctcagatgaggctgcgcccctgcgggcagctctaaggaccg

SEQ ID NO: 25194 - DNA, 201 bp, Homo sapiens
aagcttcagtcccactccaggcttcacccccaccctgggcttcagtcccgtgcccagttccaccttcacctccagctccacctatacccccggtgactgtmccaactttgcggctccccgcagagaggtggcaccaccctatcagggggctgaccccatccttgcgacagccctcgcctccgaccccatccccaaccccct

SEQ ID NO: 25195 - DNA, 201 bp, Homo sapiens
ccatattatgataagagccaaaagtagatagggtcagttcacgtgcttcgagttcacagggactatgggtctaaggagccggggtggaggaaacagacatygtcaatggtggcttcacgggagggagatgggatctcaactgggcccttggaggagaagctgccacgacctcccccaacaccttgacattaaatgaacaga

SEQ ID NO: 25196 - DNA, 201 bp, Homo sapiens
cagaaggtggccctggatggctggggagatgtcgagctgcatcagtagctctctcgtccctggggccacataggccctgaggcatgtcaccacaagtcccyactgccagctgagtccagggtgccagggctgagagaggaagtgaaatttatgatgctttctttctttttcctcagtttgtgggaaatcgacacctgaaaa

SEQ ID NO: 25197 - DNA, 201 bp, Homo sapiens
ggggttattggactggtccctcacctaggggacagggagaagagagatagtgtgtgtccccaaggaaaatatatccaccctcaaaataattcgatttgctstaccaagtgccacaaaggtaggggcaagtggaaacggtgaatgccctcaggtctggggtgctgcttctttctctgcttcttccagttgttcttccctaac

SEQ ID NO: 25198 - DNA, 201 bp, Homo sapiens
tggactggtccctcacctaggggacagggagaagagagatagtgtgtgtccccaaggaaaatatatccaccctcaaaataattcgatttgctgtaccaagkgccacaaaggtaggggcaagtggaaacggtgaatgccctcaggtctggggtgctgcttctttctctgcttcttccagttgttcttccctaactttgctgt

SEQ ID NO: 25199 - DNA, 201 bp, Homo sapiens
ggactggtccctcacctaggggacagggagaagagagatagtgtgtgtccccaaggaaaatatatccaccctcaaaataattcgatttgctgtaccaagtrccacaaaggtaggggcaagtggaaacggtgaatgccctcaggtctggggtgctgcttctttctctgcttcttccagttgttcttccctaactttgctgtc

SEQ ID NO: 25200 - DNA, 201 bp, Homo sapiens
acataggccctgaggcatgtcaccacaagtccccactgccagctgagtccagggtgccagggctgagagaggaagtgaaatttatgatgctttctttcttyttcctcagtttgtgggaaatcgacacctgaaaaagaggtgagatgaaatgagagagttactcccaaatgtccctgaccattccttataattgcctaatgc

SEQ ID NO: 25201 - DNA, 201 bp, Homo sapiens
acacacttaggggtatgtcaggaaggggatgcagggacaggaggatgcaggactcataccccatcttctcccctcaccagaaatgggtcaggtggagatcycttcttgcacagtggaccgggacaccgtgtgtggctgcaggaagaaccagtaccggcattattggagtgaaaaccttttccagtgcttcaattgcagcct

SEQ ID NO: 25202 - DNA, 201 bp, Homo sapiens
actggcttctactagagtggaagacagatgtatcattagatcgatcagttgatccatatttatctgctcccagtctggaggtctggttctgggagctgagrggacaccaggggaggataagacactttctgaccaagacattttttgatctctcatcttataaggttcgtggtcactttggggagatcatatctgtcaccc

SEQ ID NO: 25203 - DNA, 201 bp, Homo sapiens
ggctccagttctggcctttggggttcaagatcactgggaccaggccgtgatctctatgcccgagtctcaaccctcaactgtcaccccaaggcacttgggaygtcctggacagaccgagtcccgggaagccccagcactgccgctgccacactgccctgagcccaaatgggggagtgagaggccatagctgtctggcatggg

SEQ ID NO: 25204 - DNA, 201 bp, Homo sapiens
ctgaccacaccactacattccgtcctggtggtgaaggttgcagtgagctatgattgtgccactgcacttcaccctgggtgacagagtgagaccctgtttcaaaaaaaaaaaaaaaaaagtagtgaggcatctgtggaagtcttcagatcatttccatgaccatggaaatgctgtttggagccaggccctggagatggagag

SEQ ID NO: 25205 - DNA, 201 bp, Homo sapiens
ctttttgtagagacagggtcctactatattgcccaggctggcctcggactcctgggctcaagcgatcttccgcctcagcctcccaaagtgctaggattacsggcatgagccaccacgcctggcctgggccttagatttcttatatttaaagtaagcataatgacattcatttggtgaatttgtgagaaccaaaaacaaaga

SEQ ID NO: 25206 - DNA, 201 bp, Homo sapiens
aggaaggggatgcagggacaggaggatgcaggactcataccccatcttctcccctcaccagaaatgggtcaggtggagatctcttcttgcacagtggaccrggacaccgtgtgtggctgcaggaagaaccagtaccggcattattggagtgaaaaccttttccagtgcttcaattgcagcctctgcctcaatgggaccgtg

SEQ ID NO: 25207 - DNA, 201 bp, Homo sapiens
tcaggggttattggactggtccctcacctaggggacagggagaagagagatagtgtgtgtccccaaggaaaatatatccaccctcaaaataattcgatttkctgtaccaagtgccacaaaggtaggggcaagtggaaacggtgaatgccctcaggtctggggtgctgcttctttctctgcttcttccagttgttcttccct

SEQ ID NO: 25208 - DNA, 201 bp, Homo sapiens
gccgtctcttcttttagctgtaagaaaagcctggagtgcacgaagttgtgcctaccccagattgagaatgttaagggcactgaggactcaggtgaggagargtgacctggtgcccatgctcacctgccctctccctcttcttgcccccacccgtccatccatcccacccatccatctatccctgcggcccccctctgcccg

SEQ ID NO: 25209 - DNA, 201 bp, Homo sapiens
agacttcagggaatcggccctggctgttgtccctagcatggggctccttccttgtgttctcacccgcagcctaactctgcggccccattcacaggaacctrcttgtacaatgactgtccaggcccggggcaggatacggactgcagggagtgtgagagcggctccttcaccgcttcagaaaaccacctcagacactgcctc

SEQ ID NO: 25210 - DNA, 201 bp, Homo sapiens
tgcccgttttgggtgtcctcaccagcaaggctgctcgggggcccctggttcgtccctgagcctttttcacagtgcataagcagttttttttgtttttgttwtgttttgttttgtttttaaatcaatcatgttacactaatagaaacttggcactcctgtgccctctgcctggacaagcacatagcaagctgaactgtccta

SEQ ID NO: 25211 - DNA, 201 bp, Homo sapiens
tggcctgagaaagcctctctccctccctccctccagggaggctcatcccccactggccagaggtccctgaaaagctccctttaaggctgtctggggctggsgtcccccagttcttcatcatgactctgcctcaagccccctggatgggattcaaagtaccagtgaccttaggtgctccagtggcttcttcggggaaaggaa

SEQ ID NO: 25212 - DNA, 201 bp, Homo sapiens
agaaatgggtcaggtggagatctcttcttgcacagtggaccgggacaccgtgtgtggctgcaggaagaaccagtaccggcattattggagtgaaaaccttwtccagtgcttcaattgcagcctctgcctcaatgggaccgtgcacctctcctgtgagcgcagctctcctgaggccaagccctctccccaccccaggggttg

SEQ ID NO: 25213 - DNA, 201 bp, Homo sapiens; identical to SEQ ID NO: 17131

SEQ ID NO: 25214 - DNA, 201 bp, Homo sapiens
cctcctgtattctgtgggtctgacaaccaactcctctctggccgcccccaccctgtccctcgtcacttcctctgtcctgtggggtgggggtgcaggcgctyctcctttagctgtgccgcacttctccctacaggccaggagaaacagaacaccgtgtgcacctgccatgcaggtttctttctaagagaaaacgagtgtgtc

SEQ ID NO: 25215 - DNA, 201 bp, Homo sapiens
gggaggatcacttgagcccaggattttgagaccagtctgagcaacgtaacaagaccctgcctctactaaaaataaaaaaaaattagctgggcatggtggtkcacggccgtagtcccagctattcaggaggctaaggtgggaggactgcttgagcgtgggtggtggagggtgcagtgattgcatcactgcactccagcctgg

SEQ ID NO: 25216 - DNA, 201 bp, Homo sapiens
aggcccccaaacccagcacaactggtcagaaccagccaggctgtgggaatgcggtgaacccagggtgggagggcagccttggcttgcttcctgctgggackggggagtgttgggggatggagtgagagctcacggaatgggtttagctgttggagacttgttgaactgggaggaggagctggggcggggcctcagctaaag

SEQ ID NO: 25217 - DNA, 201 bp, Homo sapiens
ctggcatgggcctctccaccgtgcctgacctgctgctgccactggtgagaccagggacaaagggaagagtgggctggtgggcgaggcaccttccggctggygtgggccctctccgggagggggccgagcctctcctgcccgggcctggtcctggcgccagcctcaggcctgcaggtcctaacctcagccactgccagtgtg

SEQ ID NO: 25218 - DNA, 201 bp, Homo sapiens
tgttgtccctagcatggggctccttccttgtgttctcacccgcagcctaactctgcggccccattcacaggaacctacttgtacaatgactgtccaggccyggggcaggatacggactgcagggagtgtgagagcggctccttcaccgcttcagaaaaccacctcagacactgcctcagctgctccaaatgccgaaagggt

SEQ ID NO: 25219 - DNA, 201 bp, Homo sapiens
gggaccgtgcacctctcctgtgagcgcagctctcctgaggccaagccctctccccaccccaggggttggccccttccccatgcggtggcacttcctttccktccccctcctgtattctgtgggtctgacaaccaactcctctctggccgcccccaccctgtccctcgtcacttcctctgtcctgtggggtgggggtgcagg

SEQ ID NO: 25220 - DNA, 201 bp, Homo sapiens
tggccccttccccatgcggtggcacttcctttccttccccctcctgtattctgtgggtctgacaaccaactcctctctggccgcccccaccctgtccctcrtcacttcctctgtcctgtggggtgggggtgcaggcgcttctcctttagctgtgccgcacttctccctacaggccaggagaaacagaacaccgtgtgcacc

SEQ ID NO: 25221 - DNA, 201 bp, Homo sapiens
gccatcagctgagctcatcccccgtgcactccacaacgctgaggctctgcacatggctcaccagtgccaggtgctgccagtcagcagtgccgtgctgtttscacagcagcctgcatacgtctatattgcccagcccgtttcacctggcggggtcacacaaaccaccccctggtattgttagcacgtccacataatggcatc

SEQ ID NO: 25222 - DNA, 201 bp, Homo sapiens
acgctgaggctctgcacatggctcaccagtgccaggtgctgccagtcagcagtgccgtgctgtttgcacagcagcctgcatacgtctatattgcccagccygtttcacctggcggggtcacacaaaccaccccctggtattgttagcacgtccacataatggcatctccacagctgtgtcatccagaagaaacccatagcc

SEQ ID NO: 25223 - DNA, 201 bp, Homo sapiens
actgaccaggggctgctgtgaatgctgtttggagaaatcggggctgggggtaggcagggttatgttttgaatttctgagaccagagcttctttctgtggcrttgtaacagctgtgctttgcctcctagagtcttagagagcctccttgtgtctctggtaaccaccgtggtggtgtttgtggcctcgatggtgttaggagaa

SEQ ID NO: 25224 - DNA, 201 bp, Homo sapiens
gctcactgcagcctcagcctcccaggctcaagcgatcctcccacctcagcttcttgagtagctgggaccataggcatataccttttgtactttttgtagcracatggtctcactacattgcccaggctggcctccaactcttaggctcaagtgatcctcctgcctcagcctcccaaagtgttgggattacaggcatgagcc

SEQ ID NO: 25225 - DNA, 201 bp, Homo sapiens
tttcaccctgcccagggctcttcgtggggaaggaaggccccatgatccacagtggttcggtggtgggagctggcctccctcaggtaagatgggctgagagrgtgtgggcctctgggcaggcctagtgggaggtctggttacactgggccaaatccattgggacaccctgacatcacattggaacctggtgccattctggct

SEQ ID NO: 25226 - DNA, 201 bp, Homo sapiens
catccagcgagctacggaacatgtgtgatgagcacatcgcctctgaggagccagccgagaaggaggacctcctgcagcagatgctggaaaggaggtgagarcctggcggggcccccactgcccgcagggctacacagcggtggggtgagcctttggctcagatgttgtgaggtggctcctgagtttcctgggaaagttgga

SEQ ID NO: 25227 - DNA, 201 bp, Homo sapiens
gagacaagcggtcccgtctcacacggcttagtgctttgcccacccctggctggggtggacttaccggctctcaggggaagttggcactgttctcatcacaygcgacagggagagtagatttgacagcaggggcagctttatcaggccgtgaagatgtgtgtgcgttcttgccgcaatgagcatgtggacagatctgttttt

SEQ ID NO: 25228 - DNA, 201 bp, Homo sapiens
ttttaacctcacctttgtcttcctggcaagcctccttgttctcattgaggtgaggtggtttggattcacctgctcgcttaggaggttttagagtcccgcaytccttttccccacctccttccagaatgtcaggaaactgagaatgcagattcctgcagaaagtggcctcttgttcactaaaggtaaaggtttcacctctgg

SEQ ID NO: 25229 - DNA, 201 bp, Homo sapiens
tcttgaactcctgaactcaagtgattcacctgcctcggcctcccaaagtgctgggattacatgcgtcagccactgcacccggcctcagtcttttcttctaygcggcacaaccctggcatgcatagtgcgtacttacacaggttttgttgcagtaggttaacttatgtcccttgaaatgtaattgccaactacactgacaga

SEQ ID NO: 25230 - DNA, 201 bp, Homo sapiens
cttgaactcctgaactcaagtgattcacctgcctcggcctcccaaagtgctgggattacatgcgtcagccactgcacccggcctcagtcttttcttctatrcggcacaaccctggcatgcatagtgcgtacttacacaggttttgttgcagtaggttaacttatgtcccttgaaatgtaattgccaactacactgacagag

SEQ ID NO: 25231 - DNA, 201 bp, Homo sapiens
tcagctgatatgcatattcatgtaaatttttgttgttcttgtcattgtttgagacagagtctcactctgtcgcccaggctggaatgcagtggtacggtctyggatcactgcgacctccacccccgcctctgagttcaagctgttctcctacctcagcctcccaagtagctgggactacatgcatacaccaccatgcctggc

SEQ ID NO: 25232 - DNA, 201 bp, Homo sapiens
tgaggcaggagaatggtgtgaacccgggaggcggagcttgcagtgagctgagattgcgccactgcactccagcctgggcgacagagcgagactccgtctcaaaaaaaaaaaaaaaaagtggaagttgcttttaaaaatactttccatgttagtttgtcttgtgactaacctcatttccatagacactaactacaaaagata

SEQ ID NO: 25233 - DNA, 201 bp, Homo sapiens
aactcaagttcggagtggtacagacatgtatccttttcacggttcctggtgttcgtggacttcagtggtcaccaagattctttcttacatagaaatgggtytaacagtaagcatagtattagaagggccgcttattagctattcagctttaatatttctaatgatcactgaaggacacaaaagaaggactttaataagcaa

SEQ ID NO: 25234 - DNA, 201 bp, Homo sapiens
tggtctcacatctttttctgcacctgcttccctctttgttttccgttgcttcactcaacttagctgtactctctgcctttgttctttggaggggcagtggractgggctggagaagggatctcctccttctgcgcttttctgctgtgcattcacgtactgctggctggtgagcagcctccgtatgtgcagtgggggaggag

SEQ ID NO: 25235 - DNA, 201 bp, Homo sapiens
ttctttaaaaagtgcaagtctggccactttgggaggccaaggcgggcagatcacctaagatcgggagtttgagaccattctgaccagtgtggagaaacccygtctctagtaaaaatacaaaattagccggtaaaaatacaaaattagccgggcgtggtggcgcatgcctgtaatcccagctactcgggcgactgaggcagg

SEQ ID NO: 25236 - DNA, 201 bp, Homo sapiens
tacctcaaaaaaaaaaaagaaaaaaaagtgcaagtcctcccattgcccctcagacctcctgagtcagatcctctggagtggggcccagcagctgtggttcwgcaagccctccaggtgacgctcacgctgctaatgaaggtggccagctctccctcttccgccgcccagattgttgagggtaagccagagaaccaatggatt

SEQ ID NO: 25237 - DNA, 201 bp, Homo sapiens
agccctcgttagctgtttatcccaatcaagctgtgtctggctgtgcactatccaggcctccacattctgtgacaaactaacagggccggctcctgtcactyctgttctcgccagcgggttttaccctgaaggtgactcaggccttctctttgccctagatcgtggggatcatcacacggcacaacctcacctatgaatttc

SEQ ID NO: 25238 - DNA, 201 bp, Homo sapiens
gagctgagcgctgagcatgtgccctgtggaaggacattttagttcagatgccagctggcccaagccctttttggagctaaccttgtccccttggcctccartgtgtgagccctcgttagctgtttatcccaatcaagctgtgtctggctgtgcactatccaggcctccacattctgtgacaaactaacagggccggctcct

SEQ ID NO: 25239 - DNA, 201 bp, Homo sapiens
ttgacacccaggctccctcaccccttctactaaattgtacttacatttgtaatgtgcttgccttcagctgatatgcatattcatgtaaatttttgttgttsttgtcattgtttgagacagagtctcactctgtcgcccaggctggaatgcagtggtacggtcttggatcactgcgacctccacccccgcctctgagttcaa

SEQ ID NO: 25240 - DNA, 201 bp, Homo sapiens
gctggtctcgaactcctgacctcaggtgatactgcttcggtctcccagagtgctgggattacaggtatgagccactatacctggccattttcttctgtttygtaagtatttgttttcttgtacatagttgagaagtttgcaggaattagtataagatactccatattgttctgtcaccttgcactccctcactgaaccctg

SEQ ID NO: 25241 - DNA, 201 bp, Homo sapiens
tacaaaggaatgcatcgggtttgagggagagctggggcagttcagaagagccccccaccccgcccgtggtctgagcagggctggagagccagcacagcttsctcccaggggcctgcgggcactgtcatgaggctggatgacttgccctcctcccccaggctgagagccagcgacatcatggagcccaacctgacctacgtc

SEQ ID NO: 25242 - DNA, 201 bp, Homo sapiens
tagtgtattttatgtgtggccaaagacaattcttcttccagtgtggtccagggaagccaaaagagtagacacccctgtgtcagtagtctttcttggtctcrcatctttttctgcacctgcttccctctttgttttccgttgcttcactcaacttagctgtactctctgcctttgttctttggaggggcagtgggactgggc

SEQ ID NO: 25243 - DNA, 201 bp, Homo sapiens
tgttcgtatgttaccattcagatacctgacaaacacactcttcagttttgggatttggaatttagcttgtggaattagcttttgtcaaaattagcaagctytttgtgtcaacagccagatagtaaatatttaaggctttgtgggccaagaatcagaatggaagctcttatgtagatgtttatgtaactatttacatgtgtg

SEQ ID NO: 25244 - DNA, 201 bp, Homo sapiens
tttaatgcatggggtgggagaggcgaggaagtcaccatcaaaccactttatctacagttagcataagatgtgagaagtgttgacaggaagctgcagcttaratgggatgatcacaactccatggcaacaagatgacacaaatgcagcagagaccccaggggacaggagcctcttgcagtctgtccctaggcccagccctgc

SEQ ID NO: 25245 - DNA, 201 bp, Homo sapiens
tcacgaggaaggtttttgtagccaaggtctcctgacccaggggcgtttctgcactgactgttggtctttcctttttcaccctgcccagggctcttcgtggrgaaggaaggccccatgatccacagtggttcggtggtgggagctggcctccctcaggtaagatgggctgagagggtgtgggcctctgggcaggcctagtgg

SEQ ID NO: 25246 - DNA, 201 bp, Homo sapiens
aaagcaagcttgtccaacccatggcccaacacagattcatataccttttaaaaacatttatgagatttttctgagtttttcttttcttagctcatcagctrtcattagtgtattttatgtgtggccaaagacaattcttcttccagtgtggtccagggaagccaaaagagtagacacccctgtgtcagtagtctttcttgg

SEQ ID NO: 25247 - DNA, 201 bp, Homo sapiens
gtggtacagacatgtatccttttcacggttcctggtgttcgtggacttcagtggtcaccaagattctttcttacatagaaatgggtctaacagtaagcatrgtattagaagggccgcttattagctattcagctttaatatttctaatgatcactgaaggacacaaaagaaggactttaataagcaaagacatatacctat

SEQ ID NO: 25248 - DNA, 201 bp, Homo sapiens
gaggctgaggcaggagaatggcatgaacctgggaggcggagcttgcagtaagccaagatcacgccactgcactccagcctgggtgacagagcaagactccrtctcaaaaacaaacaaacaaaaacatcaatggctgggtgcagtggctcatgcctgtaatctcaggactttgggaggccgaggcaggcagatcacctgagg

SEQ ID NO: 25249 - DNA, 201 bp, Homo sapiens
tcacggaccaccttctttttgtattcctgcaagttcggcacatacccagaaggcaccttgatgtttttactgatgccggggttttctggaaggaagatccrgtgggaacatggtgcagcagtgatcgtgccgatctttgatctgccccctgagctgggggctgagattctgagatcacagaaaacacagaggtcaggggct

SEQ ID NO: 25250 - DNA, 201 bp, Homo sapiens
cccatgcggagctgcctcttcatgccgttggcgtctcaggcagtcagtgacacgtggtctctttgcaggatgtcaccccatacatgaacccttcgcctttyaccgtctcgcccaacacccacgtctcccaagtcttcaacctgttcagaacgatgggcctgcgccacctgcccgtggtgaacgctgtgggagaggtgagcg

SEQ ID NO: 25251 - DNA, 201 bp, Homo sapiens
tgttgcttctctgtaaccacttgaatctctcagatccccattggggcccttgtcttggaggacagcctcttcagtgtccccagttatatgtatatattatwtatatatatatatatatatatatacacacacacactatatatatacacacacacacacacacacacacacacaaacacacattatatatttctgtttgtt

SEQ ID NO: 25252 - DNA, 201 bp, Homo sapiens
tccacaggaaagctcaggacagctgggaaagctgaaggaccagaaccatgtgctgtggggagcagtgcagggtctagcagacatcccttgggtaccaggargaaggagcactggccctgggttcctcctgattccgattcagaatccagggagagggggtatcctgttgcctcacttgggtcatgtgccactccttggctt

SEQ ID NO: 25253 - DNA, 201 bp, Homo sapiens
acctgcccgtggtgaacgctgtgggagaggtgagcgaggccccggccctgcccccacctttgagagaggatcccctagccaggtgctgtttgtgcacccakgcttctcaccagaaacgtaggcatcccaccaggaggggagagtgtggcccaacactagctttgaaccctgctcggcttccgtgcactcgggaccctttcc

SEQ ID NO: 25254 - DNA, 201 bp, Homo sapiens
tgggagaatcgcttgaacccgggagacagaggctgcagtgagccgagatcgcgccattgcactccagcctgggcaatgagagcaaaactgtctcaaaaaamaacaacaaaaaaaaaaaacaaacaaaatcaataaatttgaccacatcaaagtacatattgtatttataaagacaaaaactccaaataacaacaataaaac

SEQ ID NO: 25255 - DNA, 201 bp, Homo sapiens
acttgggtcatgtgccactccttggctttgggggcaggcacgttgattgaaaattctatcaagacaggatgtaggagatggcttgttcccctctggagaawcaagctgctcttcccagattaaaggaaaccacagaagctgcagccaggtcctagggttcaggctcatttgaaccaccagcctgagccactcttttgaacc

SEQ ID NO: 25256 - DNA, 201 bp, Homo sapiens
atcgcttgaacccgggagacagaggctgcagtgagccgagatcgcgccattgcactccagcctgggcaatgagagcaaaactgtctcaaaaaaaaacaacaaaaaaaaaaaacaaacaaaatcaataaatttgaccacatcaaagtacatattgtatttataaagacaaaaactccaaataacaacaataaaacaccataa

SEQ ID NO: 25257 - DNA, 201 bp, Homo sapiens
cagccgagaaggaggacctcctgcagcagatgctggaaaggaggtgagagcctggcggggcccccactgcccgcagggctacacagcggtggggtgagccyttggctcagatgttgtgaggtggctcctgagtttcctgggaaagttggatggggagcgggctgggaacatggatcagaagcgctcccgctgagggtatcc

SEQ ID NO: 25258 - DNA, 201 bp, Homo sapiens
tgatccttcggtcgcagcttgtcaccctgcttgtccgaggagtttgttactctgaaagccagtcggtaagtctctccgaggcagaaatcagccaggccagrcctgacgaagctcgaggggttgggcgctgccggcgggccgtgaacagtgccatagggaaagctgaatgcaaggcgagaagtgcagagtggacttagggga

SEQ ID NO: 25259 - DNA, 201 bp, Homo sapiens
tgtgaacacagcccccatcctcgccactgtcatcacacggcgttctcctgtgtatcttctctcctttccctaaggacgcttgtcaccggatttggggcccrccctaatccagcatgggttcatctgaactcggtcacatctgtagagaccttgtttccagaaaggtcgcattcataggtactagggcttaggacttggcca

SEQ ID NO: 25260 - DNA, 201 bp, Homo sapiens
tacctacaatgacatggccacactcttcttcaacccgcaggagtctgccatcctccagctcttccaccaggatggtgagtgtctgcactgcagcccaatcrtgggtgattggtgtcatctcggacacagccaggcttgcccttcattccaagcaagaccaggacttctttgtaacgcccacccagacaaaagattggtttc

SEQ ID NO: 25261 - DNA, 201 bp, Homo sapiens
attcataggtactagggcttaggacttggccatatcttttggtggggggacacattcaccccccagccactttacttagtgctttctcacttaaacttccwaataagccatttgcatctcatgaatcaggaagaaagggagtgcagacagatcaggggacttgcccagggtgccacagctaggacttggccaaggacttgg

SEQ ID NO: 25262 - DNA, 201 bp, Homo sapiens
gaatatacaagtgccgtgtacaacagtgtggacacttttgaaatacacacaataatttcaggttagtggtttctcccaggggagagaggaaggaaaactgtttttttttttgttttgttttgtttcttaaaatggtactgaatgttttcttttttaaaaatacctggagcatatatggcatgttgttgagatttgttaaag

SEQ ID NO: 25263 - DNA, 201 bp, Homo sapiens
catttgcatctcatgaatcaggaagaaagggagtgcagacagatcaggggacttgcccagggtgccacagctaggacttggccaaggacttggtttgactrgagagctctcactctggagcgcttgctgctgctgcaccacctgcctcagcagcctggagctgggcatattcaggcatcaaggggaggggctctaaggtga

SEQ ID NO: 25264 - DNA, 201 bp, Homo sapiens
cttctctgctgtgtggagctgcttttggacgtttagttgccaatgtcctaaaaaggtactctgtgtgtgtgcgtgtgtgtgcgcatgtgcatgtgtgtgcrcgtgtgcgtgtgtatgcatgtgtgtgcgtgtgcgtgcgttgatgtgtctgtgcccatgcatgcacatatgtgcataggcacaagagtatgagctgtaggt

SEQ ID NO: 25265 - DNA, 201 bp, Homo sapiens
ccagcccaccctctcctggtgctgcctggggaggcaaatcatgctcactccggcgggcacagctggctggggctgttccggggcatggaagattcccagtyacccactcactcagaaagccgggagtcatcggacaccttgctggtcagaggtcctgggggtggttttgaaccatcagagcttggacttttctgacttccc

SEQ ID NO: 25266 - DNA, 201 bp, Homo sapiens
cataggttatatgcaaatatacaccattttatatctgggacttgagcatccctggattttggtatccatcgggatcctggaccctatccctggtgaatackgaggaacaactgtactctttccttgttgcttctctgtaaccacttgaatctctcagatccccattggggcccttgtcttggaggacagcctcttcagtgt

SEQ ID NO: 25267 - DNA, 201 bp, Homo sapiens
gcgggcacagctggctggggctgttccggggcatggaagattcccagtcacccactcactcagaaagccgggagtcatcggacaccttgctggtcagaggycctgggggtggttttgaaccatcagagcttggacttttctgacttccccagcaaggatcttcccacttcctgctccctgtgttcccaccctccagtgttg

SEQ ID NO: 25268 - DNA, 201 bp, Homo sapiens
tccatcgggatcctggaccctatccctggtgaatactgaggaacaactgtactctttccttgttgcttctctgtaaccacttgaatctctcagatccccaytggggcccttgtcttggaggacagcctcttcagtgtccccagttatatgtatatattatatatatatatatatatatatatatacacacacacactatat

SEQ ID NO: 25269 - DNA, 201 bp, Homo sapiens
ggagatgccagtgacaacatacagttcatgactaggtttaggaattgggcactgagaaaattctcaatatttcagagagtccttcccttatttgggactcytaacacggtatcctcgctagttggttttaagggaaacactctgctcctgggtgtgagcagaggctctggtcttgccctgtggtttgactctccttagaac

SEQ ID NO: 25270 - DNA, 201 bp, Homo sapiens
cttgttgcttctctgtaaccacttgaatctctcagatccccattggggcccttgtcttggaggacagcctcttcagtgtccccagttatatgtatatattatatatatatatatatatatatatatacacacacacactatatatatacacacacacacacacacacacacacacaaacacacattatatatttctgtttg

SEQ ID NO: 25271 - DNA, 201 bp, Homo sapiens
aatggacaagtaaggccatgattttgctcatgtcctagtttcagaatgtataagctctgaggcctaaggaatgttgttattagggtaggaaacagtaactyacttttcttgggctgaaagaagcaacacacccattcctgagcatgtgtgagaatgtggagcagcccatgggctgggggctgcgggggcagggcaggggac

SEQ ID NO: 25272 - DNA, 201 bp, Homo sapiens
ggcccttgtcttggaggacagcctcttcagtgtccccagttatatgtatatattatatatatatatatatatatatatatacacacacacactatatatayacacacacacacacacacacacacacacaaacacacattatatatttctgtttgttttgtttttttaagacggagtcttactctgttacccaggccggag

SEQ ID NO: 25273 - DNA, 201 bp, Homo sapiens
ctgtaacagccctgcaagacacagataacattttatttttttaaaaagttgttagtcccctaaaccaaagagcaacatatactgcagaaataaaaagttartcatagcaaaggagaagtaacagtatctggttttaataatagctcatatattccattggtacatatttacaaagggccaaactcaactaatttatttaaa

SEQ ID NO: 25274 - DNA, 201 bp, Homo sapiens
gaggtgtcctgaagaggagggtggttatttggagactatcagtggaaatgaagagctcagctgatggctgtagatcctcacccacatggtccctcaccccygaaaggttttttttgagggctggttcctatttgataatggctccagatgatttagaagctagccactgatttcagtaaatacttctgcctccttccactc

SEQ ID NO: 25275 - DNA, 201 bp, Homo sapiens
tgcgatctcggctcaccacaacctccacctcccaggttccagtgattctcctgcctcagcctccaaagtagctgggactacaggtgcgcgccaccatgccyggctaattttgtatttttagtagagacagggtttcaccatgttggctagactggtcttgaactcctgacctcaggtgatccacctgccttgacctcccaa

SEQ ID NO: 25276 - DNA, 201 bp, Homo sapiens
aaatccttaagctccatcagtactgctgtgttcgtttgcccatgcgcagtagcctgtggcctccccacccacagaaatccagcatcctcacccgggctggygagcagcgcaaacggagccagtccatgaagtcctacccatccagcgagctacggaacatgtgtgatgagcacatcgcctctgaggagccagccgagaagg

SEQ ID NO: 25277 - DNA, 201 bp, Homo sapiens
tcacttttatatgcactgggtaaccaaaacactcgtgtgactcactttattgtgatatttgctttattgtggtggtctagaaccaaacccatgctatctgyaaggtaggcctatgttggcatttattccctaggcctttatcctgccaaccagagttccccctgtcagtgcaccttgcccagcctcttaagagtccatcat

SEQ ID NO: 25278 - DNA, 201 bp, Homo sapiens
cattttttaaaatataaaaaagcacaccatttgtgctatgagaatttcagacaacacccagaaacaaatatctccttaagcactacctcacggatgttttyccattatgaatgctgacgtacaaataatcctaattttgtttaatcaaaaagggatattatacttttaattctccatcctgctttatttttattttttaat

SEQ ID NO: 25279 - DNA, 201 bp, Homo sapiens
aaagcacaccatttgtgctatgagaatttcagacaacacccagaaacaaatatctccttaagcactacctcacggatgttttcccattatgaatgctgacktacaaataatcctaattttgtttaatcaaaaagggatattatacttttaattctccatcctgctttatttttattttttaattgcatcttgctcttttgc

SEQ ID NO: 25280 - DNA, 201 bp, Homo sapiens
caaataacaacaataaaacaccataaataaagtgaaaacaagtccacagcctgagagaggttatttactatgcatttaagaggcagataattagtatccasaatacaggaagaggctgggcgcggtggctgacgcctgtaatcccagcactttgggaggccgaggcaggcggatcacttgaggtcaggagttcaagaccag

SEQ ID NO: 25281 - DNA, 201 bp, Homo sapiens
gaaattatttttctttaaaaagtgcaagtctggccactttgggaggccaaggcgggcagatcacctaagatcgggagtttgagaccattctgaccagtgtrgagaaaccccgtctctagtaaaaatacaaaattagccggtaaaaatacaaaattagccgggcgtggtggcgcatgcctgtaatcccagctactcgggcga

SEQ ID NO: 25282 - DNA, 201 bp, Homo sapiens
ttccagctccaggtaaccccagtgcacctgctacctttatcccataccacgaggaagaatccagaaatgtatgaccttcctctgttgagaactaatagatrtgttgggttcatccttccacacccattacctgagcgttgagagatatgggaatctgtagtcgtctttttacctcagagaaagtgcacaccacatgccctg

SEQ ID NO: 25283 - DNA, 201 bp, Homo sapiens
gttctcattgtaaccctaacatgtgagaataaaatgtcttctgtctcctctgtctcctttagccttttgtctccatgctgctttctttctttctttctttytttgagacagagtctcgctgtcacccaggctggagtgcagtggtgccatctcagctcactgcaagctccgcctcccaggttcacgccattctcctgcctc

SEQ ID NO: 25284 - DNA, 201 bp, Homo sapiens
accagagaaaatctaattaatactctcattttctgaatgttcccccctaaaaacaacaaaaaccccactaggagtggaatttgaggcctccccaaccaccyaccaaaaaaggagggtgaaatgaaaggaagaagaaaaactcagcattctttcctctgacaaagagtaaaacgacaaggaatatcggcctgaattctcttc

SEQ ID NO: 25285 - DNA, 201 bp, Homo sapiens
ggtaccttgttcagtctagaggagggttcgtccttctggaaccaagggctcacgtggaaagtggtgaggaggaccttcagtgaaagcattaaccacacccmccgaattacactgggtgtcccttactcggtacatggaatggtagttttgatgagactgggggggtcaactggatcagaaacagctttcctcttgtgccca

SEQ ID NO: 25286 - DNA, 201 bp, Homo sapiens
gttcatgactaggtttaggaattgggcactgagaaaattctcaatatttcagagagtccttcccttatttgggactcttaacacggtatcctcgctagttkgttttaagggaaacactctgctcctgggtgtgagcagaggctctggtcttgccctgtggtttgactctccttagaaccaccgcccaccagaaacataaag

SEQ ID NO: 25287 - DNA, 201 bp, Homo sapiens
gcccttgtcttggaggacagcctcttcagtgtccccagttatatgtatatattatatatatatatatatatatatatatacacacacacactatatatatacacacacacacacacacacacacacacaaacacacattatatatttctgtttgttttgtttttttaagacggagtcttactctgttacccaggccggagt

SEQ ID NO: 25288 - DNA, 201 bp, Homo sapiens
ttcttctccaggctggcccgccccctctgactaggcacccaaagtgagcatctgggcattgggcattcatgcttatcttcccccaccttctacatggtatyagtcccagcaggcatccctggggcagacgtgctttggctcaagatggccttcatttacgtttagttttttttaaaaccgtggaggttgcccacgggcctc

SEQ ID NO: 25289 - DNA, 201 bp, Homo sapiens
cccttgtcttggaggacagcctcttcagtgtccccagttatatgtatatattatatatatatatatatatatatatatacacacacacactatatatatacacacacacacacacacacacacacacaaacacacattatatatttctgtttgttttgtttttttaagacggagtcttactctgttacccaggccggagtg

SEQ ID NO: 25290 - DNA, 201 bp, Homo sapiens
gtgacaggaaagcctttcgagaggcccaaggtggcctcgccagccctgcagtattgatgtgcagtattgcaccacagctctgcggaccttggccattgccrcagtcgcagcttccttttttctgtttgcactgtttgtttgtatgatgttagctaattccactgtgtatataaattgtattttttttaatttgtaaaatgc

SEQ ID NO: 25291 - DNA, 201 bp, Homo sapiens
aacttcttaaagcccaatctagagttggtcatacctggggtgtatctactgtaagggtgactagatctctgtacccggatgtagattccggaggtctctgygtagagcagtgggtaccaggaggaagggttgggagagagtaggacatgccactcctgaaccttcttgtcttttgtcacctctcccctagctcttttgttc

SEQ ID NO: 25292 - DNA, 201 bp, Homo sapiens
ctctagaattcatctcctcctgctagcagccgcgtcctggaggagcagcggatggggaatccattctgtttcttcctggtgtttaggaagttgccccacamacagattgccccgatgtccaaccagaagaagtgaaactgctgctgggtctggagaggtgaagacccgtggccagcttctgttgttgccatcggccattgc

SEQ ID NO: 25293 - DNA, 201 bp, Homo sapiens
ccttgtcttggaggacagcctcttcagtgtccccagttatatgtatatattatatatatatatatatatatatatatacacacacacactatatatatacacacacacacacacacacacacacacaaacacacattatatatttctgtttgttttgtttttttaagacggagtcttactctgttacccaggccggagtgc

SEQ ID NO: 25294 - DNA, 201 bp, Homo sapiens
agggcagatcgatcagaggagtcccaggggccccgcccgagggcacctccatctctctgggctgggctgacttccccggtccagggaggcacctcagggarggggctgagagcagcccccgcttcttcattcggctcactgagcacttgtgggggcacgacctcatcttctaaaggcatcttttcttccaaatggtccagc

SEQ ID NO: 25295 - DNA, 201 bp, Homo sapiens
cggccattgctttttgttcgcttgcttttggttttgcaagaagagcggcctctgtctctgatctgcttcaaatcatcattccatcagtgacagaagtggcygttccatcagtggtcgcagccagttcagctcctgcatccatccccaagtgttctgtaagtcccaggggcattttctgccttgtgtttttgtcatttttca

SEQ ID NO: 25296 - DNA, 201 bp, Homo sapiens
cttgtcttggaggacagcctcttcagtgtccccagttatatgtatatattatatatatatatatatatatatatatacacacacacactatatatatacacacacacacacacacacacacacacaaacacacattatatatttctgtttgttttgtttttttaagacggagtcttactctgttacccaggccggagtgca

SEQ ID NO: 25297 - DNA, 201 bp, Homo sapiens
tgtcttggaggacagcctcttcagtgtccccagttatatgtatatattatatatatatatatatatatatatatacacacacacactatatatatacacayacacacacacacacacacacacaaacacacattatatatttctgtttgttttgtttttttaagacggagtcttactctgttacccaggccggagtgcagt

SEQ ID NO: 25298 - DNA, 201 bp, Homo sapiens
cagtggtcgcagccagttcagctcctgcatccatccccaagtgttctgtaagtcccaggggcattttctgccttgtgtttttgtcatttttcaatcagttycattcaatgagaactccctgtgttacctgtgttacggtgacaccttgagaatgggctacttcccctcctagcaacccgcaacaccatcccagacctcagg

SEQ ID NO: 25299 - DNA, 201 bp, Homo sapiens
caagtgatccacccatctcggcctcccaaattgctaggattacaggtgtgtcaccacgcccagcctggtttatatatatatgtttttgtttttgtttttgytttttttttggcaaagtctcactctgttgcccaagctggagtggagtggcaagatctcggctcactgcaaactccacctcctgggttcaagcgattctcc

SEQ ID NO: 25300 - DNA, 201 bp, Homo sapiens
cgcaaggagcaagttactacttcatttcctcttttcccaatttctggacaagaccaaggcaatttgaccaacatttatggggcatcaactctgagagtgcygaaggggcatttgccctcaaagagcttgcagtctagggacgtagacacaagcaattgcacataggcaactcgtgttgtgtgctattataacagttacatg

SEQ ID NO: 25301 - DNA, 201 bp, Homo sapiens
tgctggaacggaaacttcttaaagcccaatctagagttggtcatacctggggtgtatctactgtaagggtgactagatctctgtacccggatgtagattcyggaggtctctgcgtagagcagtgggtaccaggaggaagggttgggagagagtaggacatgccactcctgaaccttcttgtcttttgtcacctctccccta

SEQ ID NO: 25302 - DNA, 201 bp, Homo sapiens
tatgaatattttaatttcccagtgctagtggcagttgcttttttttttttttttttttgagacggagtcttgctctgtcgcccaggctggagtgcagtggygccatctctgctcactgcaagctccgcctcccgggttcacgccattctcctgcctcagcctccggagtagctaggacttacaggcgcctgccaccacgcc

SEQ ID NO: 25303 - DNA, 201 bp, Homo sapiens
aatggctccagatgatttagaagctagccactgatttcagtaaatacttctgcctccttccactcctaaccactaaaaaaggctccctctgcggatctgtktttctagaccatccttggagaaacacaggaggaggaggatgagattcttccaaggaaagactatgaggtgagctcctttgatactgcttgggcaactaaa

SEQ ID NO: 25304 - DNA, 201 bp, Homo sapiens
ctaattttttgtatttttagtagagacggggtttcaccgtgttagccaggatggtctccatctcctgacctcgtgatccacccgccttggcctcccaaagygctgggattacaggcgtgagccaccgcgcctggcctttttttttttttttttttttttttgagacagtctcgctctatcacctaggctggactgcagtgg

SEQ ID NO: 25305 - DNA, 201 bp, Homo sapiens
ggggtttcaccgtgttagccaggatggtctccatctcctgacctcgtgatccacccgccttggcctcccaaagtgctgggattacaggcgtgagccaccgygcctggcctttttttttttttttttttttttttgagacagtctcgctctatcacctaggctggactgcagtggcgcgatctctgctcactgcaacctctg

SEQ ID NO: 25306 - DNA, 201 bp, Homo sapiens
ctgtgtggagctgcttttggacgtttagttgccaatgtcctaaaaaggtactctgtgtgtgtgcgtgtgtgtgcgcatgtgcatgtgtgtgcacgtgtgcrtgtgtatgcatgtgtgtgcgtgtgcgtgcgttgatgtgtctgtgcccatgcatgcacatatgtgcataggcacaagagtatgagctgtaggtcctcccca

SEQ ID NO: 25307 - DNA, 201 bp, Homo sapiens
tgggattacaggcgtgagccaccgcgcctggcctttttttttttttttttttttttttgagacagtctcgctctatcacctaggctggactgcagtggcgygatctctgctcactgcaacctctgcctcctgggttcaagtgattctcctgcctcagcctcccaagtagctgagagtacaggtgcccgccaccacacccag

SEQ ID NO: 25308 - DNA, 201 bp, Homo sapiens
tccaggatccctgcctattcattcacaggtgtgagaaaatgttcatgataaggaagtcagaaaccaccttttgggggctgggggctctttattggataacycgtctctctcctctcctcagagacaagagagactttgtatcagcaggagcggctgctggagttgctgcagctttcggggcgccaatcgggggtaccttgt

SEQ ID NO: 25309 - DNA, 201 bp, Homo sapiens
gcacacatgttgactgaccaggggctgctgtgaatgctgtttggagaaatcggggctgggggtaggcagggttatgttttgaatttctgagaccagagctkctttctgtggcgttgtaacagctgtgctttgcctcctagagtcttagagagcctccttgtgtctctggtaaccaccgtggtggtgtttgtggcctcgatg

SEQ ID NO: 25310 - DNA, 201 bp, Homo sapiens
ccaagcaagaccaggacttctttgtaacgcccacccagacaaaagattggtttctgcctcctgtgttggaaggggaactggtatggggtgtggtcgggccyggtaggtctactgggccttggcaggcatccggtagtgggactcaggttggctcttcccttgcaggtactttcagccccgtcactctggccttgttcttcg

SEQ ID NO: 25311 - DNA, 201 bp, Homo sapiens
caaaccactttatctacagttagcataagatgtgagaagtgttgacaggaagctgcagcttagatgggatgatcacaactccatggcaacaagatgacacraatgcagcagagaccccaggggacaggagcctcttgcagtctgtccctaggcccagccctgcttgtcctccctggctgttatcttcggtactgcaaagag

SEQ ID NO: 25312 - DNA, 201 bp, Homo sapiens
tacagttagcataagatgtgagaagtgttgacaggaagctgcagcttagatgggatgatcacaactccatggcaacaagatgacacaaatgcagcagagamcccaggggacaggagcctcttgcagtctgtccctaggcccagccctgcttgtcctccctggctgttatcttcggtactgcaaagagaacacagacatatc

SEQ ID NO: 25313 - DNA, 201 bp, Homo sapiens
aacaagatgacacaaatgcagcagagaccccaggggacaggagcctcttgcagtctgtccctaggcccagccctgcttgtcctccctggctgttatcttcrgtactgcaaagagaacacagacatatctggcttggtgacctggctgtcctggaaaagtcagcttcatgtatgagtgtgcccatcctctgaacttgattac

SEQ ID NO: 25314 - DNA, 201 bp, Homo sapiens
ggaggaccttcagtgaaagcattaaccacaccccccgaattacactgggtgtcccttactcggtacatggaatggtagttttgatgagactgggggggtcractggatcagaaacagctttcctcttgtgcccataacctccacactggactttctgtacttctcatatcaataccctccctaaccccaaatcaaaccgct

SEQ ID NO: 25315 - DNA, 201 bp, Homo sapiens
cccatttccatccccagttcctcttacccggaagctgttacagcccagtccgctctgggctccaatcctgtccatcctgcccccgaagcagctggatctcygcaggctccgaggggcagtgagcagcgccctcagcttgctttttaggagggcagatcgatcagaggagtcccaggggccccgcccgagggcacctccatc

SEQ ID NO: 25316 - DNA, 201 bp, Homo sapiens
ttccagccagagccgcgcctctaccaggctgtgtcttcctcctgaaatgttgctcttcactccgtaccactggtgttccttggttctccacctgcgtaggkatttgcgcattagatgagagaatttcaagcaaaatactttgagttttacaaagatataaaacacctagtaattattgctgcagactttccttttttcttc

SEQ ID NO: 25317 - DNA, 201 bp, Homo sapiens
ggactgcagtggcgcgatctctgctcactgcaacctctgcctcctgggttcaagtgattctcctgcctcagcctcccaagtagctgagagtacaggtgccygccaccacacccagctaatttttgtatttttagtagagctggggtttcaccatgttggccaggatagtcttgatctcttgacctcatgatccgcctgcct

SEQ ID NO: 25318 - DNA, 201 bp, Homo sapiens
tgagagaggatcccctagccaggtgctgtttgtgcacccaggcttctcaccagaaacgtaggcatcccaccaggaggggagagtgtggcccaacactagckttgaaccctgctcggcttccgtgcactcgggaccctttcccctgcctgccagcagatggcaccagcgtcccactggccgtcctttccagccagagccgcg

SEQ ID NO: 25319 - DNA, 201 bp, Homo sapiens
caggtgcccgccaccacacccagctaatttttgtatttttagtagagctggggtttcaccatgttggccaggatagtcttgatctcttgacctcatgatcsgcctgcctcggcctcccaaagtgctgggattacaggcgtgagccaccgtgcccagcccccccccttttttttttaagcattttctcagcagactagctaa

SEQ ID NO: 25320 - DNA, 201 bp, Homo sapiens
ctggggtttcaccatgttggccaggatagtcttgatctcttgacctcatgatccgcctgcctcggcctcccaaagtgctgggattacaggcgtgagccacygtgcccagcccccccccttttttttttaagcattttctcagcagactagctaaggacaatagatggcatgtcctgacacccatggggcactctgggtgtt

SEQ ID NO: 25321 - DNA, 201 bp, Homo sapiens
tcaagtgatcctcctgcctcagcctcccaaagtgttgggattacaggcatgagccattgcacccagtcatctcaggcagtttttaaaaaatttttatatakagagaaaaagtgcactcagcagccagcatgatccaaaggagaagcagctgcaccctctcaagtgatgacggggacacccctcggctgatgaacaagtttc

SEQ ID NO: 25322 - DNA, 201 bp, Homo sapiens
tgcctgctctccacgtggaatttagcttaaaactggttggccaagatgtatttcttcccctctgccaccataaccctgtaaactgaatcattcttttcctrtgtgaacagaaaggtcgaagatatgaggcggtgaagtggatggtggtgtttgccattggagtctgcactggcctggtgaggaggcagggcctggagggat

SEQ ID NO: 25323 - DNA, 201 bp, Homo sapiens
aactggttggccaagatgtatttcttcccctctgccaccataaccctgtaaactgaatcattcttttcctgtgtgaacagaaaggtcgaagatatgaggcrgtgaagtggatggtggtgtttgccattggagtctgcactggcctggtgaggaggcagggcctggagggatggtgggccatagggctggaggggcttacag

SEQ ID NO: 25324 - DNA, 201 bp, Homo sapiens
gatagtcagtcaactagaaaacccttctgttgaatatctttctaaaaagtgccccttcttcctgtctcaggaagagttcattgcacatatttgactctttrtttgataaatttagggtcttacaaaatgttagaatcccattttgacatccattctcattataggtggtttgaaaaatggtaactttctgtgagatgtgcc

SEQ ID NO: 25325 - DNA, 201 bp, Homo sapiens
tctttcctttttcaccctgcccagggctcttcgtggggaaggaaggccccatgatccacagtggttcggtggtgggagctggcctccctcaggtaagatgrgctgagagggtgtgggcctctgggcaggcctagtgggaggtctggttacactgggccaaatccattgggacaccctgacatcacattggaacctggtgcc

SEQ ID NO: 25326 - DNA, 201 bp, Homo sapiens
ttggtgtcatctcggacacagccaggcttgcccttcattccaagcaagaccaggacttctttgtaacgcccacccagacaaaagattggtttctgcctccwgtgttggaaggggaactggtatggggtgtggtcgggcccggtaggtctactgggccttggcaggcatccggtagtgggactcaggttggctcttcccttg

SEQ ID NO: 25327 - DNA, 201 bp, Homo sapiens
tcctctgacaaagagtaaaacgacaaggaatatcggcctgaattctcttcccaagaagaaagaaagcacaccaacgcaggcatttgtcttctgtccatggkgctgaagtttattcactttcaaaccactttcagtaacaggtgaggttctaccttaaaatttaatgcatggggtgggagaggcgaggaagtcaccatcaaa

SEQ ID NO: 25328 - DNA, 201 bp, Homo sapiens
tcaccatcaaaccactttatctacagttagcataagatgtgagaagtgttgacaggaagctgcagcttagatgggatgatcacaactccatggcaacaagrtgacacaaatgcagcagagaccccaggggacaggagcctcttgcagtctgtccctaggcccagccctgcttgtcctccctggctgttatcttcggtactg

SEQ ID NO: 25329 - DNA, 201 bp, Homo sapiens
tttgtatttttagtagagacgaggcttctccatgttggtcaggctggtcttgaactcctggcctcgggtgatccgcccgccttggcctcccaaagtgctgrgattacagacgtgagccactgcgcccagctaattcctacagtcaattttagaatattttcatcacctgagaggaaaccctgcactcattagcagccactg

SEQ ID NO: 25330 - DNA, 201 bp, Homo sapiens
ccaggatagtcttgatctcttgacctcatgatccgcctgcctcggcctcccaaagtgctgggattacaggcgtgagccaccgtgcccagcccccccccttytttttttaagcattttctcagcagactagctaaggacaatagatggcatgtcctgacacccatggggcactctgggtgttggggcagaaacttgagaggg

SEQ ID NO: 25331 - DNA, 201 bp, Homo sapiens
gctgcaggtggtgctgctgctgcggtgagcgtgagacccgcacccccgaggagctggtaagaagccggcggagtcggcctggggagggggcggttgctaarggactgagagaggcgttgccgggggtggggccgggccaatctgggcccgcaggtggcagcgggtggggcctggggaccgcagccagggctctcgaagcgt

SEQ ID NO: 25332 - DNA, 201 bp, Homo sapiens
aagctgtgtctggctgtgcactatccaggcctccacattctgtgacaaactaacagggccggctcctgtcactcctgttctcgccagcgggttttaccctkaaggtgactcaggccttctctttgccctagatcgtggggatcatcacacggcacaacctcacctatgaatttctgcaggcccggctgaggcagcactacc

SEQ ID NO: 25333 - DNA, 201 bp, Homo sapiens
ttcagaagagccccccaccccgcccgtggtctgagcagggctggagagccagcacagcttgctcccaggggcctgcgggcactgtcatgaggctggatgayttgccctcctcccccaggctgagagccagcgacatcatggagcccaacctgacctacgtctacccgcacacccgcatccagtctctggtgagcatcctgc

SEQ ID NO: 25334 - DNA, 201 bp, Homo sapiens
atgcaaggcgagaagtgcagagtggacttaggggaggagtcgccacagccgggtggtgagaagcaacagcggtttattccttcatagttcaaggccagaartacaaaatccgggtgtcaccagggcagcgctccctggctctggtgctgtccttgccccttcctagctcatgggagttgcctgcagaccttggtgctcctg

SEQ ID NO: 25335 - DNA, 201 bp, Homo sapiens
agcatgtgtcgggggatagaagtacaaaggaatgcatcgggtttgagggagagctggggcagttcagaagagccccccaccccgcccgtggtctgagcagrgctggagagccagcacagcttgctcccaggggcctgcgggcactgtcatgaggctggatgacttgccctcctcccccaggctgagagccagcgacatcat

SEQ ID NO: 25336 - DNA, 201 bp, Homo sapiens
cctaataagccatttgcatctcatgaatcaggaagaaagggagtgcagacagatcaggggacttgcccagggtgccacagctaggacttggccaaggactyggtttgactggagagctctcactctggagcgcttgctgctgctgcaccacctgcctcagcagcctggagctgggcatattcaggcatcaaggggaggggc

SEQ ID NO: 25337 - DNA, 201 bp, Homo sapiens
tgtgtgtgcgtgtgcgtgcgttgatgtgtctgtgcccatgcatgcacatatgtgcataggcacaagagtatgagctgtaggtcctccccacagcctatcartgtggttcaaagccatgttctcggtgttttccttcactagctacattggattgggccacatctattcggggacctttgccctgattggtgcagcggcttt

SEQ ID NO: 25338 - DNA, 201 bp, Homo sapiens
caccattttatatctgggacttgagcatccctggattttggtatccatcgggatcctggaccctatccctggtgaatactgaggaacaactgtactctttycttgttgcttctctgtaaccacttgaatctctcagatccccattggggcccttgtcttggaggacagcctcttcagtgtccccagttatatgtatatatt

SEQ ID NO: 25339 - DNA, 201 bp, Homo sapiens
tgctacacttggaaataaggctgtgtgacagatctcttgctcttcacaggtgggtctctttgtggacttttttgtgcgactcttcacccaactcaagttcrgagtggtacagacatgtatccttttcacggttcctggtgttcgtggacttcagtggtcaccaagattctttcttacatagaaatgggtctaacagtaagc

SEQ ID NO: 25340 - DNA, 201 bp, Homo sapiens
gcatttcagataagtgttactcaagctgaagcaactttacctcctacctttgtattttaggaaggcacacctgcctttatgacatagcactcccaactctygtccattgatgtgtggccactttatggcttcagtatcaaaaagcctccaggcattggcttgagggaaggccagagttaaaggcaagaagctttgatcctg

SEQ ID NO: 25341 - DNA, 201 bp, Homo sapiens
gactgaggcaggggaattgctggaacccagaaggcggaggttgcaatgagtggagattgtgccattgcactccagcctgggcaacaagagtgaaactctayctcaaaaaaaaaaaagaaaaaaaagtgcaagtcctcccattgcccctcagacctcctgagtcagatcctctggagtggggcccagcagctgtggttctgc

SEQ ID NO: 25342 - DNA, 201 bp, Homo sapiens
gttccccagatggggtctagaaggagaggcagcctggaggactgggtctgctctccaggcattatggaggtgggttttcttttgcagcaaattcaggtgctttttttttttttgtagcaaattgcagcaaaatcaaaggctttttctatttggaaccagagttggggctttcggtcaagtggtgccctggattttcctccc

SEQ ID NO: 25343 - DNA, 201 bp, Homo sapiens
tcatggagcccaacctgacctacgtctacccgcacacccgcatccagtctctggtgagcatcctgcgcaccacggtccaccatgccttcccggtggtcacrgagaaccgcggtaacgagaaggagttcatgaagggcaaccagctcatcagcaacaacatcaagttcaaggtaaagaaaacggcatgagaggaaaggcagg

SEQ ID NO: 25344 - DNA, 201 bp, Homo sapiens
ggcgccaatcgggggtaccttgttcagtctagaggagggttcgtccttctggaaccaagggctcacgtggaaagtggtgaggaggaccttcagtgaaagcrttaaccacaccccccgaattacactgggtgtcccttactcggtacatggaatggtagttttgatgagactgggggggtcaactggatcagaaacagcttt

SEQ ID NO: 25345 - DNA, 201 bp, Homo sapiens
ttaactgtccactttttacaaacaaattgctggaatacagcaaatcacggatcaattctgcacacatgttgactgaccaggggctgctgtgaatgctgttyggagaaatcggggctgggggtaggcagggttatgttttgaatttctgagaccagagcttctttctgtggcgttgtaacagctgtgctttgcctcctagag

SEQ ID NO: 25346 - DNA, 201 bp, Homo sapiens
acctcctgcagcagatgctggaaaggaggtgagagcctggcggggcccccactgcccgcagggctacacagcggtggggtgagcctttggctcagatgttktgaggtggctcctgagtttcctgggaaagttggatggggagcgggctgggaacatggatcagaagcgctcccgctgagggtatcccaggcagcatctggt

SEQ ID NO: 25347 - DNA, 201 bp, Homo sapiens
ctgaagccatctaagggcccccagccgccactcatctcattagcaaacaaaagataccacggctcaaaaaaaaaaaaagacaaagtatgtttgtgtgtgtgtgtgtgtgtgtgtgtgtgtgtgtgtgtgtgtgtgtgtgtattgttggggctcagaaaatgatacctggaaatatggtgctttgatatgctgaactctcca

SEQ ID NO: 25348 - DNA, 201 bp, Homo sapiens
gaagccatctaagggcccccagccgccactcatctcattagcaaacaaaagataccacggctcaaaaaaaaaaaaagacaaagtatgtttgtgtgtgtgtgtgtgtgtgtgtgtgtgtgtgtgtgtgtgtgtgtgtgtattgttggggctcagaaaatgatacctggaaatatggtgctttgatatgctgaactctccacc

SEQ ID NO: 25349 - DNA, 201 bp, Homo sapiens
agtggtgaggaggaccttcagtgaaagcattaaccacaccccccgaattacactgggtgtcccttactcggtacatggaatggtagttttgatgagactgrgggggtcaactggatcagaaacagctttcctcttgtgcccataacctccacactggactttctgtacttctcatatcaataccctccctaaccccaaatc

SEQ ID NO: 25350 - DNA, 201 bp, Homo sapiens
gagatgccagcaacagaaatggacttcgacctccttaagaaagagaaagaaatccacaggaaagctcaggacagctgggaaagctgaaggaccagaaccaygtgctgtggggagcagtgcagggtctagcagacatcccttgggtaccaggaggaaggagcactggccctgggttcctcctgattccgattcagaatccag

SEQ ID NO: 25351 - DNA, 201 bp, Homo sapiens
tggagaagggatctcctccttctgcgcttttctgctgtgcattcacgtactgctggctggtgagcagcctccgtatgtgcagtgggggaggagatgccttyaagaggagcacacctgtactatacttgtgctacacttggaaataaggctgtgtgacagatctcttgctcttcacaggtgggtctctttgtggactttttt

SEQ ID NO: 25352 - DNA, 201 bp, Homo sapiens
ttgtcctttccccaaggatttttaatttgacccatgaaaatttcctctcaagtgaaggaccagagagaaatgagcagagggctaggtacaacttccagggrcacatctcacccattagcctctgccgtgcgggaaagcagccccactcttgcttctgtcttctcttctgtctcttccggttctcatggctgctatggtttt

SEQ ID NO: 25353 - DNA, 201 bp, Homo sapiens
ctctgcagcacacgcagctggagagggcttctgtccctgtcagcggcagagggcgttggggctggccggggcaccttgtccctgctatggtccacatgctmacgctgtccacctgccaggtggagtgtatgtggctgtggccctccctcgtggaggtgccgtgctttaaagaggccttagtgcccgggatgggcacagtgt

SEQ ID NO: 25354 - DNA, 201 bp, Homo sapiens
ctcccccttgcacccgaggccctcgcagcagggagctcagcgaggcagagggtggggctgcacagaggggaacatcagctgcagctctgcaccaggccggyccctggggactggggcgctcctccctcaggctttctccctcagtcttggcttctccagggctctggggtgtctggagctaggcttggccctaccattctg

SEQ ID NO: 25355 - DNA, 201 bp, Homo sapiens
cggcctcccaaagtgctgggattacaggcatgagccaccgcacccggcctgtgcactttatttctattattattacattataatatataatgaaataattwtacatctcaccataatgtagaatcagtgggagccatgaacttgttttccgcaactagacggtcccatctgggggtgatgggagatagtgacagatcatca

SEQ ID NO: 25356 - DNA, 201 bp, Homo sapiens
aaagccaaggcccagagtggtgggcgggaggcagttcttccccaccgctcctcacctctctctgtctcctcccgtcccacccccaagtctgttcacacagygagcctgcagttttcaaggtggcttgtcaaggacatctcctgacatgcacgttcacctcctgaccttgttcctgctgtaaatttgtgaattaagtgggga

SEQ ID NO: 25357 - DNA, 201 bp, Homo sapiens
ggcagtttaaaaactggcaaggaacagaagggttgtgggggcagatttttatctaaagtcagggccatgatttgtgcatttgaccctgtgtaagttacacygcaacaagaaagtgaatttttaaaaatcacaaaaatactgcagatagacataaagccaaggccctagagtcagggtgctggaggctcagcagcttctctc

SEQ ID NO: 25358 - DNA, 201 bp, Homo sapiens
ctggagtgatcctcccaccccagccttctgagtagctgggcccacaggtgtgtgccaccatacccagctaatttttatttgtatttttttgtagagatggkgtctccctgtgtttcccaggcaggtcttaaactcttgggcttaagtgatcctcctgcctcggcctcccaaagtactagaattagagacatgagccatgtg

SEQ ID NO: 25359 - DNA, 201 bp, Homo sapiens
cagcagcgcaactgcgaggacatgatccagatgttccaggtgaggacggagctgccctctgctctcaggggtgggtggggcaggtggatgcttccgtggcrgctggcctggaacgcaggccctgcctcctgcttggggagccttacctggcaactggggccctcacggggctagactggggggtaaggagcagcatcagga

SEQ ID NO: 25360 - DNA, 201 bp, Homo sapiens
gaggatttctcaggctatgccatggcagctgcagaggcccagggagaggtaacctctgctcccggcctcagggccctctggctctgcctctccagcctgamgcccactcccccgctcctctccttgctctgtccccccatgtggctgtcatcctctacctgcgtctcccctcttcctttatccttttgcttttctttctcc

SEQ ID NO: 25361 - DNA, 201 bp, Homo sapiens
atggcctctgcagcacacgcagctggagagggcttctgtccctgtcagcggcagagggcgttggggctggccggggcaccttgtccctgctatggtccacrtgctcacgctgtccacctgccaggtggagtgtatgtggctgtggccctccctcgtggaggtgccgtgctttaaagaggccttagtgcccgggatgggcac

SEQ ID NO: 25362 - DNA, 201 bp, Homo sapiens
tgacccactctgttgatacactatgtgtcctgcagatgcttttacagggttaaatgataccacaagaggcagggcagcgggctcgacgagctctgttctgrtgcgggcaggaggcgggagcccggatctgtgcgactgaaggtgggagactgggccgggtggacctggtggtctggtgtgggcaggaggtgggcaatgagg

SEQ ID NO: 25363 - DNA, 201 bp, Homo sapiens
tctgctgtctggccctgtaacctgtttccttctttctctaagttcccaccctctctgtccaatccacattatggcagctggtatcctccccgttctcttcwctcaggcagtcacgaacgtcatctccaggaagtttcattttgcttccccttgcggcccctgccctttgtacccaaaacaaagagaggcagtcgactgtcc

SEQ ID NO: 25364 - DNA, 201 bp, Homo sapiens
cggatttctttgattctgagccccgtgttttccacgtgtgacatttctgaaatcaggacaggtctcagaatcaatggcacctccaatatgggagtcttccytttagtgtctgaaaatggcttttaggtgagaaaataaagtgataaggagagaatggtaagaggattgggcccctttcagcagttagccaggcttgtatgc

SEQ ID NO: 25365 - DNA, 201 bp, Homo sapiens
tgtggatgaagatttggctgtctgagaggagcccggccccaaggggcaagggaaagggatgtgatgccaggagtgctggctgtataccaagtggattcctyagatggctgataaccaagccgataggacaggagtgagagcagaggtagtgtcttgcagactccaacccaagccttgaggagggagcgggtgactgacagg

SEQ ID NO: 25366 - DNA, 201 bp, Homo sapiens
taaagatgtgcttcctccgtgtctgtcatacactgagaccaacaggctacagtgtccctgattcttggaaaagcctggagaagctggggagatgcggttcmcaatgcctcggtataggaggctgtgttgagctgacattcaaatggattctttaataataatgaaactggcgagtatttattgtgcactttggtgtcactg

SEQ ID NO: 25367 - DNA, 201 bp, Homo sapiens
ctagtgttggcctgttggcctcccgtccacggctcctccccttctctttgctttccttccctttttcccctagccacccctaactccagagaaagacaagsaacaaaagtctcggtgttgcgtcacagaggtggcgcagcttctgagggcctggggttgcagagcagttagtgagcagcttctggggtggaggctctgcag

SEQ ID NO: 25368 - DNA, 201 bp, Homo sapiens; identical to SEQ ID NO: 17592

SEQ ID NO: 25369 - DNA, 201 bp, Homo sapiens
ccaaagtgctgggattacaggcttaagccaccacacccggcctccctatgagtattgaaagagatacaaaacagatattaaagaaaatgagggacattgargacatccagggaggggtctgatgcatggaaagcccaatgttggttctccagagtaagaatttcacaaaaaggacaattagacaaggcaaacctttggttt

SEQ ID NO: 25370 - DNA, 201 bp, Homo sapiens
tttttttgagacaggatcttgctttgttgcccaggctgtagtgcggtggtgcaatcaccactcactgtagcctccacctccctggatcaagacctccctgkctcaagtgatcctcccaccttagcctcctaagtaactgggactacaggcatgcacaaccatgcccagctaattttttttatttttcttttgtagagacag

SEQ ID NO: 25371 - DNA, 201 bp, Homo sapiens
aggccagacgtggtagctcacacctgtaatcccagaactttgggaggccgaggtgggaggagcgcttgagccgaggagttcaagaccagcctgggtatcayagggagaccccgtctctacaaaataaaaaaataattcactgggtgtggttgtgcacatttgtagtctcaggcactcaagaagctgaggcagaagaatcac

SEQ ID NO: 25372 - DNA, 201 bp, Homo sapiens
cgaacctcttcgggatcccaagtgggacgctggcgtgcttactcaccagcttcccagccgtcactggttgggggctgctttgggagcactaactcactggyccctgttgtttgtcctcgggcagagtcctaggtgtttgaagtaaaacctacatgctgcaagcccagatcctagaggtttcatctcatgtgctaactccta

SEQ ID NO: 25373 - DNA, 201 bp, Homo sapiens
ttttctttttttgttttccttttgagacagagtctccctttgttgcccaggctggagtgcagtggtgcgatctcagctcactgcaacctccacctcctgtrttcaagagattctcccacttcagccttccgagtagctgggactacaggcatacgccaccacacccggctaatttttgcattttttggtagagataggttt

SEQ ID NO: 25374 - DNA, 201 bp, Homo sapiens
cacgtccctggggatgctggggacccctgtcctccttatccctagcccatgctgatgacatctcagaataccccatcccacctagctgtctacaccccacygcaccactgccttgagtagaatgagtctagtaataatagctcacatttgggggctcactggactaacctcttaacatacactatctctaattcttgcact

SEQ ID NO: 25375 - DNA, 201 bp, Homo sapiens
tggagaaggtataagagacaggatctgattttagcaaggaagagagtgctgggatgtctcagtgatgtgtaccatggaactggttcctggttctccctatragtttatatatatatatattttttgagacggagtctcgctctgtcgcccaggctggagtgcagtgccgtgatctcggctcactgcaacctccacctccag

SEQ ID NO: 25376 - DNA, 201 bp, Homo sapiens
atcgcttgaacccgggagctgggggctgcagtgagctgagatcgtgccattgcactccagcctggacagcaagagggaaactctgcctcaaaaaaaaaagraaaaaagaaaaaaaaaagacaccaccctcactctcagagaactcaccctatgttgtcaggaagcaaatccatgaaacaaacttacacaaaactgctagaa

SEQ ID NO: 25377 - DNA, 201 bp, Homo sapiens
aatcgcttgaacccgggagctgggggctgcagtgagctgagatcgtgccattgcactccagcctggacagcaagagggaaactctgcctcaaaaaaaaaaraaaaaaagaaaaaaaaaagacaccaccctcactctcagagaactcaccctatgttgtcaggaagcaaatccatgaaacaaacttacacaaaactgctaga

SEQ ID NO: 25378 - DNA, 201 bp, Homo sapiens
aatcttggagactcaagtttaaatcccagctcagccattttcctactgctatgagcctcaatcccttatccataagacaggagtaaactggaacctacgayataggattgatgtaagggttggagaaaatctgtgttaaggatccacaatatctagcatctggcagatgctgagtaaatgcttatattggagcatgtgctg

SEQ ID NO: 25379 - DNA, 201 bp, Homo sapiens
agttgagctgggtattttttttatctattcactaaggcttacatcttacagattacaggcatcctacattttatatatcatctaagttttaagaatgtaayatttcactaatattgaagaaaataagttatattaccatgagtttaaatttctaacaaaattataatgttattagttatggtttacaaaattgagtgttaa

SEQ ID NO: 25380 - DNA, 201 bp, Homo sapiens
ccacgttggccaggctggtcttgaactcctgacctcaagtgatcctcccgcctcagcctcccaaagtgctgggattacaggcgtgagccactgtgcctggsccagataggaattcttggaaatagcattgtctccatcctgttactctcctgcggtgttttggggccctcttgaacatccccgggatgtggatatcacaat

SEQ ID NO: 25381 - DNA, 201 bp, Homo sapiens
atgttctgaggctgatatggaaaaccatgtggcaaagccaggacctgctggacctcgggctcgaggacctgaggatggagcagagagtccccgatgctctygtcttcaccatccagaccagggggactgcggagcccatcacggtcaccattgtgcctgcctacagagccctgggtaaggggaggggaagctcacccgact

SEQ ID NO: 25382 - DNA, 201 bp, Homo sapiens
gtggcgggtgcctgtagtcccagctactcgggaggctgaggcaggagaatggtgtgaacccaggaggcggagcttgcagtgagccgagatcgcgccactgyactccagcctgggcaagagagcaagactctgtctcaaaaaataaaataaaatataacagggatttaaagaaaaaacaattaccggccaaatgtggtagct

SEQ ID NO: 25383 - DNA, 201 bp, Homo sapiens; identical to SEQ ID NO: 17587

SEQ ID NO: 25384 - DNA, 201 bp, Homo sapiens
accatgttggccagcctggtcttgaactcctgacctcaagtgatctgcccacctcggccccacaaaatgctgggattataggcgtgagccactgcgccccrctcaaagagctggtgttaatcatggacttgcagtcaccccaagttaataagcaagcccaagatccccttcaagccaatattctttaaaatatttattcaa

SEQ ID NO: 25385 - DNA, 201 bp, Homo sapiens
gggcagatcatgagatcaggagatcgagaccatcctggctaacacagtgaaaccccatctctactaaaaatacaaaaaaatagccaggcgtggtggcgggygcctgtagtcccagctactcgggaggctgaggcaggagaatggtgtgaacccaggaggcggagcttgcagtgagccgagatcgcgccactgtactccagc

SEQ ID NO: 25386 - DNA, 201 bp, Homo sapiens
tttgtagagacagggtctcactatgttgaccagcctggtttcgaagtggtctcaagcgatcctcccaccttggcctcccaaagtgctgggattacaggcaygagccaccacacccaccccacatgttcttgttacccttcaattacagtctaggcctggcagatgtcagcttcgccgggtactgtggccattcgtcacagc

SEQ ID NO: 25387 - DNA, 201 bp, Homo sapiens
caagctcctcactgcctcagtcttctcatctgtacattggagataattctcctagtacccacctcaatacaggaagtgaaggcgtttttttttgttgtttkgttttgttttgttttgtttagatggagtctcgctgtgtcgcccaggctggagtgtagtggcgagatctcagctcaccacaacctctgcctcctgggttca

SEQ ID NO: 25388 - DNA, 201 bp, Homo sapiens
ccgggaggtggaagttgcagtgagccgagattgcaccactgcccttcagcctgggcgacagagcgagactctgtctcaaaaaaaaaaaaaaaaaaaaaaaaggaacttagggaggtctgtaaaaaggggacaaccacaacaataaacaataaaaataacagtccctaccttatagaattgctgtaagattaaaataggtta

SEQ ID NO: 25389 - DNA, 201 bp, Homo sapiens
accacacccggcctccctatgagtattgaaagagatacaaaacagatattaaagaaaatgagggacattgaggacatccagggaggggtctgatgcatggmaagcccaatgttggttctccagagtaagaatttcacaaaaaggacaattagacaaggcaaacctttggtttctgaagatatgaggtctcaagtgtccctg

SEQ ID NO: 25390 - DNA, 201 bp, Homo sapiens
tacttaccaccctctggcttcctcaatccccaatctcttcctttgctccttcactcctcagggccttctcttcccaactcccagccaccccctgaggtctrtgtgagcctgatcaaggcctgcggtggtcctggaaatttctgcccatccttcagcgagctgcagagaaatttcgtgaaacatcggccaactaagctgaag

SEQ ID NO: 25391 - DNA, 201 bp, Homo sapiens
gaccccaccctcaacgtggcagaagggtacagatgggacatcgttgctcagagggcctcccagtgcctgaaacaggactgttgctatgacaacagggagawccccatctccagctggaacgtgaaggtaatggctcctctctgggctgtcaagggcttgaaggtcagaacgacagataaactactcagtatttactcattc

SEQ ID NO: 25392 - DNA, 201 bp, Homo sapiens
tgatatggaaaaccatgtggcaaagccaggacctgctggacctcgggctcgaggacctgaggatggagcagagagtccccgatgctctcgtcttcaccatycagaccagggggactgcggagcccatcacggtcaccattgtgcctgcctacagagccctgggtaaggggaggggaagctcacccgactcacacacttgcc

SEQ ID NO: 25393 - DNA, 201 bp, Homo sapiens
tcgggctcgaggacctgaggatggagcagagagtccccgatgctctcgtcttcaccatccagaccagggggactgcggagcccatcacggtcaccattgtrcctgcctacagagccctgggtaaggggaggggaagctcacccgactcacacacttgcccaccccaggagacttcccagtgtctcacctttactcatggcc

SEQ ID NO: 25394 - DNA, 201 bp, Homo sapiens
ggggactgcggagcccatcacggtcaccattgtgcctgcctacagagccctgggtaaggggaggggaagctcacccgactcacacacttgcccaccccagsagacttcccagtgtctcacctttactcatggccacgtgcacacacccacatttattcatttcatctgtgtcctatgcttggggctgggttattgcagtgc

SEQ ID NO: 25395 - DNA, 201 bp, Homo sapiens
gagcatttccaggggaagcgtgggctggaccaggatgtgcgggtgctgaaggtagtcaaggtaagactgggctcctccagcccccacgcaagacaaaaccyagtatcagagtccacgtccctggggatgctggggacccctgtcctccttatccctagcccatgctgatgacatctcagaataccccatcccacctagctg

SEQ ID NO: 25396 - DNA, 201 bp, Homo sapiens
cgcccaccttggcctcccaaagtgctgagattacaggcatgagccatcatgcctggctgggaagtaaagattaaaaggaataatatgtatacagggctctyatgggtgccagacacagggcgtgctcatgtcatccagcatccgtgctcatgtcacacagggcatgttatatcatccggcaacagctggaatctgattctt

SEQ ID NO: 25397 - DNA, 201 bp, Homo sapiens
cttaaaaaaggaggtgtgtgccagggagctgggtaggagcctggctatatatctgcccagcagcggtactctcgggacagagatggcactgatgcaggaastgtatagcacaccagcctccaggctggactccttcgtggctcagtggctgcagccccaccgggagtggaaggaagaggtgctagacgctgtgcggaccgt

SEQ ID NO: 25398 - DNA, 201 bp, Homo sapiens
atttaattgtaaaattattagaggtatttgttgtagagctttatatattaaagagaggtattggtgcatataaaaacagtaatattattgttatgcttgtwttcttgcatttcagggtaagtaaaccctgaagaaatcttattttagtatagctacagctgcagtagcttttaagtatgtatcaacatttcattataaatt

SEQ ID NO: 25399 - DNA, 201 bp, Homo sapiens
aggaagtccgcccgcctcggcttcccaaagtgctaggattacaggcgtgagccactgcacccggccggtctttgtatttttaaatgcaacacaaaatgtgkaacttctgtggcatttagttttgatagtcttggctttgttttttgctgttacagatttcttttctgttcttcagtagaagactccaccccttagtaggat

SEQ ID NO: 25400 - DNA, 201 bp, Homo sapiens
caggatcttgctttgtctcccaggctggaacacagtggtgtgatcatagctcactgcagcctgaaactccttggcttccacctcagcctcccaaagcattrggattataggcgtgagccactgcacctggccaagtaatttcttttaggaataaaaggtacttggcattccttatttgggaagtaattacagtcttatctt

SEQ ID NO: 25401 - DNA, 201 bp, Homo sapiens
agtgatccttttttttaagcactataagtgtattttgcagtgtaaattagcagtgcttaatgtcatttttatgacataagctctttattaaaggcaatacmttaaattagaagtctaccctcattttactcttataaaatgccaattgcttgatctactgaaataataaggcatatagattaatatgctaattatttggaa

SEQ ID NO: 25402 - DNA, 201 bp, Homo sapiens
aatcccagcactttgggaggccaaggcgggcggatcacgaggtcaggagatcgagaccatcctggctaatgtggtgaaaccccatctctactaaaaaaaaatacaaaaaaattagccgggcgtggtggcaggcgcctgtagtctcagctactcaggaggctgaggcaggagaatggcgtgaagccaggaggtggagcttgc

SEQ ID NO: 25403 - DNA, 201 bp, Homo sapiens
gccgagcatggtggtggactcctgtaatcccagctactcaggaggctgaggcaggagacttgcttgaacctgggaggcagaggttgcagtgagtggagatkgcgccactgcactccagcctgggcaacagagtgagactccatctcaaataaataaataaatatctttctttactacatttattcatagttttctatctgc

SEQ ID NO: 25404 - DNA, 201 bp, Homo sapiens
cacaaaatgtggaacttctgtggcatttagttttgatagtcttggctttgttttttgctgttacagatttcttttctgttcttcagtagaagactccaccycttagtaggatgaattacagtcagccctccatatccatgggttccatatttcaaccaactgcagattgaaaatactcagaaaaaaatcgtgtctgtatag

SEQ ID NO: 25405 - DNA, 201 bp, Homo sapiens
ctggttttataattgttgtctaaagtttgctagtagtgtttcttcaaaggttattccaggtatggttaagtagtgagaaaaatcacttattaattttcaaraactttgagactaatttgtattgactcggttttttaaaataactggcaaatgctatgcttctacttttaaaatttgtggtaatacccagaatggatgtaa

SEQ ID NO: 25406 - DNA, 201 bp, Homo sapiens
gaaaaactttagaaaacattaaaaccagtccctctcatttttggaatttctgataaaaccattttataaagatgcataaatttgcctgaaattttaacttygcctgaaattttaacttcacagagaactcaagcatggtatattctgagatataactttggcttttacaggtatatgaacatgtctatgagactgtggaca

SEQ ID NO: 25407 - DNA, 201 bp, Homo sapiens
aaatgatctgattacactggacactcttaggaagtatcaaaatagaacagttcaatttgcagctacttaatgattaattacatttcttaggttttttttttgttttttttttggtttgtttgttttttgttttaaaagagacaggatcttgctttgtctcccaggctggaacacagtggtgtgatcatagctcactgcagc

SEQ ID NO: 25408 - DNA, 201 bp, Homo sapiens
aagaaaacacatttttagaattactgtacttagaaaaacctctttcctaatgccttcccacaaacaaatgtgcacttaatgttgctgatttgctctttacsgtgttcaccatttggaagcctcactgtaaatgagattgtttccgttaagcctattaaagcatcattttagaggactagctactctgggaagacttgccga

SEQ ID NO: 25409 - DNA, 201 bp, Homo sapiens
tttgggttcaacatttcttaagaaaaactttagaaaacattaaaaccagtccctctcatttttggaatttctgataaaaccattttataaagatgcataamtttgcctgaaattttaacttcgcctgaaattttaacttcacagagaactcaagcatggtatattctgagatataactttggcttttacaggtatatgaac

SEQ ID NO: 25410 - DNA, 201 bp, Homo sapiens
tgcagtgacactgtggcaggctatatctgcaggtgcccagagacctggggtgggcgcgactgttctgtgcagctcactggctgccagggccacacctgccygctggctgccacctgcatccctatcttcgagtctggggtccacagttacgtctgccactgcccacctggtacccatggaccgttctgtggccagaatacc

SEQ ID NO: 25411 - DNA, 201 bp, Homo sapiens
gcctacggggggacttgaggggaccatgagaaatcctctgggaattggtttggctgataggtactgaggtccccatcataagaggcatgtaagttctgggycagtactgtgattctggccccagacattactgaaccttggctttgtctctcccaaagggccgacatgtgaggaagatgtggatgaatgcctgtcggatcc

SEQ ID NO: 25412 - DNA, 201 bp, Homo sapiens
cctgaggctgggggagccctccctgccccagagctccacaggctgtagggtgtgggggccaagtgtctcccagtcccacctggggaccctcatgtttcccrcactcacaaagctttcatttcctatcctctctatggggccctagggaggatgaggaccccattttgcagtgaaggaaaccaaggctcagagagggacggg

SEQ ID NO: 25413 - DNA, 201 bp, Homo sapiens
gcctctgctctctccccaggttgcctgtcccatccaaggagtgcagcctgaatgtcacctgcctcgatggcagcccatgtgagggtggctctcccgctgcyaactgcagctgcctggagggtcttgctggccagaggtgggtctgggggcctgggaactgtgaggaggtccaatgaatgtggagggctgttcctccagcca

SEQ ID NO: 25414 - DNA, 201 bp, Homo sapiens
taactctggagcaggcctggcgcgacctcttccgccctgctctgggtgtccatcctgcaccctgtgtgtcccctgccctgtccaggcgtgacctgcgagayggaggtggacgagtgcgcctcagcgccctgcctgcacgggggctcgtgcctggacggcgtgggctccttccgctgtgtgtgcgcgccaggctacgggggc

SEQ ID NO: 25415 - DNA, 201 bp, Homo sapiens
ttccttgttgaacttggcaacatcacctagctcatttaggtaattactggctgaatcaccccccaccatgtcctggcctagactgctgtgagccccatgarggcagggctgtctgtctcgtttctctccctgcggttgctggcatgacccgtcccccaccccccaaccaccaccaccaccatccggctctgaatgaatgaa

SEQ ID NO: 25416 - DNA, 201 bp, Homo sapiens
ttgttaccaaaagcagcccttgactgcggtgctgaggagctgaatagttcagcatttgatgaggggattcttttatgatctaattttcagactgggaaacrgaggctctgtaggagaaatgacttacccagggtctcatagctaggaactttctgagctgaaattgaacccaggtctgtttcacttcaaagctcaagttct

SEQ ID NO: 25417 - DNA, 201 bp, Homo sapiens
gggtgggggaggggcacctttgggagctccggatgggggtggggggaggaatggaggctgtgtcttctggaggctctcctcccccatcccttaccgagttsttaccaaaagcagcccttgactgcggtgctgaggagctgaatagttcagcatttgatgaggggattcttttatgatctaattttcagactgggaaacgga

SEQ ID NO: 25418 - DNA, 201 bp, Homo sapiens
gtgggtagtgatgtggagaaggggtaggaatgagaccagcggagcacacgatccctgcttttgaagttgtccacccatcctccagaggttgaggtcgggcycatctccagtttcacccagggatggagttaccagacccctggcagaagaggtggagggggcagtgggaggagcctcaccctctggggcctccttggatgg

SEQ ID NO: 25419 - DNA, 201 bp, Homo sapiens
cctggggctgggtcttcactgctcccagggcagcctgctcccagctctgattttctctgagtaggtccttgtgctgcgctctctgctctctgagggccccrgcgtcctccccttctctgcggtcttaggcctcggtgtcgtgtctcttgcagaagggcctgcccctgccgctgccattcccactgctggaggtggccgtac

SEQ ID NO: 25420 - DNA, 201 bp, Homo sapiens
ccttccacaccccccacacaagaggtatttccactgcagggagagctttgggggctgtcaccgtctattgacaagagcacaaagctcctagctgggtcagsggcttcctcagagtgcccagggcagtggcagtgaggacagatggtctctgccaatccaaccaggactcagggccatgttggtgttctgggatttaggttg

SEQ ID NO: 25421 - DNA, 201 bp, Homo sapiens
aatgtatctgcaatgccagattctccggccagttctgtgaagtggcggtgagtgttgtcaggggtgaggggccgtggacgtggcctgctgggcccttggcragatgctgctggggagagagcgcagcaccatggggctgttcctgggccactctgtcatggggtggggcagtgagaggagcctcaggtcccttccacaccc

SEQ ID NO: 25422 - DNA, 201 bp, Homo sapiens
gggcctgggaactgtgaggaggtccaatgaatgtggagggctgttcctccagccagggtggggcgggggtcctcgcccaccttctcacccctccctggtawcacagtcaccattgtcacttgagtttccttccatgactcgcaagaccatcctctgtgatacagactgctgctgggcagtggttgcctggtggcagttctg

SEQ ID NO: 25423 - DNA, 201 bp, Homo sapiens
tggggcacctgccttcacacaggctcccgtcaccctaatgggatgagagtccttctcagtgacggctgctcaggtggtcacctggcagggcccagctgggyaggagcagcgcatggggacagtggatggataagctctgatgcttgctgaagtggggatgggcagcagagcagctgggagcacaagaggcagccatggggg

SEQ ID NO: 25424 - DNA, 201 bp, Homo sapiens
gacggccgcttcgagtgccgctgcccgcctggcttcgggggcccgcgctgcaggtgggatggctgggcaggggggtgggctgcgaatgccccctggggctrtggtggggcagagaagtctgccaggtctgtggatgagtcgcttcccttccctggtcctcatgtccttatctgtgacatgaggaggacagtttaatttgat

SEQ ID NO: 25425 - DNA, 201 bp, Homo sapiens
cccctcaaggaatgtccaggcgttgtgtttaggacctgcttttgttcagagtccttacactttgttgtcctgagtcctctgagactctggaaagcgagtgacaaccctgtgtcccttccctcccatcagggacctcaatcccatgcccaatagaggaaggccctgagttccatacatgagaacacaagctcaggtggccca

SEQ ID NO: 25426 - DNA, 201 bp, Homo sapiens
cctttctgctccaagagctgccaggtcccaacctcacagtgtctttccttctccgcactcgggagtccgctggcctgttgctccagtttgccaatgactcygcagctggcctaacagtattcctgagtgagggtcggatccgggctgaggcgccgggcagtcctgctgtagtgctccctgggcgctgggatgatgggctcc

SEQ ID NO: 25427 - DNA, 201 bp, Homo sapiens
tggtttggctgataggtactgaggtccccatcataagaggcatgtaagttctgggtcagtactgtgattctggccccagacattactgaaccttggctttrtctctcccaaagggccgacatgtgaggaagatgtggatgaatgcctgtcggatccctgcctgcacggcggaacctgcagtgacactgtggcaggctatat

SEQ ID NO: 25428 - DNA, 201 bp, Homo sapiens
ggcagtggctctcccgggagcccagcgtgtggaaggggatctggctgtggcctgacccctccctctcccctcaaggaatgtccaggcgttgtgtttaggasctgcttttgttcagagtccttacactttgttgtcctgagtcctctgagactctggaaagcgagtgacaaccctgtgtcccttccctcccatcagggacct

SEQ ID NO: 25429 - DNA, 201 bp, Homo sapiens
tgtccttttgctgatgaggaaactgaggctcaggaggtgaagtgacctgcccagggtcccactacaggagggtggcagggcagatttacatctgtctcttyagcccagctgctcctaccctctggcggtccccgtgtctccccgagctagtcctggtgtgagagagacaccctgaccgagatagagagctgcctgagcctt

SEQ ID NO: 25430 - DNA, 201 bp, Homo sapiens
ttggggtctggagtgggttccaggaatctgtattcttaatgtgggcccgtgattccgggaagcttggagtgaggccctgggtttggattccagcctccctygggctgtggactgtgaggctgcttcgagtctccctttcctgagctgtaaaacaggcatcataatcctatccacctcggaggtaaatgccaagatcaactg

SEQ ID NO: 25431 - DNA, 201 bp, Homo sapiens
gctatcgtggcctcctaggctcactcctggaagacagagacaacctgaggtcagcggttcccacacctaaaagtgaaaggaatcccccaggagcaggttgsgatgcagattctcaggctcagggcccagtggttctaaatttggggtctggagtgggttccaggaatctgtattcttaatgtgggcccgtgattccgggaa

SEQ ID NO: 25432 - DNA, 201 bp, Homo sapiens
gccctgcctctcccacagcctgacccctgtttcaatggtgggacttgcctcgtcacctggaatgacttccactgtacctgccctgccaatttcacggggcstacgtgtgcccagcagctgtggtgtcccggccagccctgtctcccacctgccacgtgtgaggaggtccctgatggctttgtgtgtgagtgtgtgtcctgg

SEQ ID NO: 25433 - DNA, 201 bp, Homo sapiens
tgcctctcccacagcctgacccctgtttcaatggtgggacttgcctcgtcacctggaatgacttccactgtacctgccctgccaatttcacggggcctacrtgtgcccagcagctgtggtgtcccggccagccctgtctcccacctgccacgtgtgaggaggtccctgatggctttgtgtgtgagtgtgtgtcctgggcag

SEQ ID NO: 25434 - DNA, 201 bp, Homo sapiens
gcctgcacacccctggggctgggtcttcactgctcccagggcagcctgctcccagctctgattttctctgagtaggtccttgtgctgcgctctctgctctytgagggccccggcgtcctccccttctctgcggtcttaggcctcggtgtcgtgtctcttgcagaagggcctgcccctgccgctgccattcccactgctgga

SEQ ID NO: 25435 - DNA, 201 bp, Homo sapiens
ccagtggctggcagggggtgggtagtgatgtggagaaggggtaggaatgagaccagcggagcacacgatccctgcttttgaagttgtccacccatcctccmgaggttgaggtcgggcccatctccagtttcacccagggatggagttaccagacccctggcagaagaggtggagggggcagtgggaggagcctcaccctct

SEQ ID NO: 25436 - DNA, 201 bp, Homo sapiens
cattgtggtgacaaggctctcaggaaggcaggaggagaggaagggggatgaggatctctgggcgtggcttccaagccggttggtgaccctctgttagagcyccggtgctggaagcatcatggtggccaggggcaggtgtccgtgagccatctcaatacctgctctgtaccatgcgaccttggccaggccggccactcaggt

SEQ ID NO: 25437 - DNA, 201 bp, Homo sapiens
tgggaaacggaggctctgtaggagaaatgacttacccagggtctcatagctaggaactttctgagctgaaattgaacccaggtctgtttcacttcaaagcycaagttctcacctgggcattgtggtgacaaggctctcaggaaggcaggaggagaggaagggggatgaggatctctgggcgtggcttccaagccggttggt

SEQ ID NO: 25438 - DNA, 201 bp, Homo sapiens
gcactcgggagtccgctggcctgttgctccagtttgccaatgactccgcagctggcctaacagtattcctgagtgagggtcggatccgggctgaggcgccrggcagtcctgctgtagtgctccctgggcgctgggatgatgggctccgtcacctggtgatgctcagcttcgggcctgaccagctgcaggacctggggcagc

SEQ ID NO: 25439 - DNA, 201 bp, Homo sapiens
ccatgggttatgagtgctgcaccctcctgagcagtgctggccacacccagtcccagggctgtgccctgcatcaccttggtgaatcctttcaacacctccaygagatgggcactttttgcaccccagatacaaaccaggactgcccgatgccccaaacctgtgccctttcctgggggagctggaaggatgcgggtcaggcca

SEQ ID NO: 25440 - DNA, 201 bp, Homo sapiens
agggacaggtgctacagacacatgtggatctaccagcacatgcacctacctacacacatggcatgtgcctgcacaccaatgtgcacaccccaacacgcacrtgtggacatgtgtgcattcacactcagtgtgcactcacaggggacctggaggcacagagtggatggaggctgtggggggtctggacactggtgtgtacac

SEQ ID NO: 25441 - DNA, 201 bp, Homo sapiens
cagtggatggataagctctgatgcttgctgaagtggggatgggcagcagagcagctgggagcacaagaggcagccatgggggaagccgctttctcagcccmcctccctctccaggtgtcaggtccccactctcccctgtgaagccaacccctgcttgaatgggggcacctgccgggcagctggaggggtgtctgaatgtat

SEQ ID NO: 25442 - DNA, 201 bp, Homo sapiens
aattattctgcccaaaagagaatttcaccctttcctgatgactgagtgagtgtctgcaagcctccatggttattcagccctacccttgtagggtagagccytggggcccagggatattagatgaacaatttcttcccctatgctagaagttcccacaccttatgagatcttaggtcgcttcttagaaatattctgtctctt

SEQ ID NO: 25443 - DNA, 201 bp, Homo sapiens
caataaacgcccatctctgtccttctagccagaactcctttgttgtataggcctccccgagcagtggctgtgacaggtggtttcctggcacttgcctgcayacccctggggctgggtcttcactgctcccagggcagcctgctcccagctctgattttctctgagtaggtccttgtgctgcgctctctgctctctgagggc

SEQ ID NO: 25444 - DNA, 201 bp, Homo sapiens
ttcagagccccccagtgcctgtgcctcagacccgtgcgctccagggaccgagtgccaggctaccgagagtggtggctatacctgtgggcccatggagcccyggggctgtgccacccagccatgccaccacggcgctctgtgtgtgccccagggtccagatcccaacggcttccgctgctactgcgtgccgggtttccaggg

SEQ ID NO: 25445 - DNA, 201 bp, Homo sapiens
cggggccctttaccatgggttatgagtgctgcaccctcctgagcagtgctggccacacccagtcccagggctgtgccctgcatcaccttggtgaatccttycaacacctccatgagatgggcactttttgcaccccagatacaaaccaggactgcccgatgccccaaacctgtgccctttcctgggggagctggaaggatg

SEQ ID NO: 25446 - DNA, 201 bp, Homo sapiens
cgcttcttagaaatattctgtctcttgatttgttgggacaggaagcttccccagtaaatgcttctttttttgtttgtggtttttcgtttttttttgttttyttttttttttttttttttttaagaaagggtctcaccctgttgccctggctgcagtgcagtggcaaaatcatagcccactgtagcctcgacaccctgggct

SEQ ID NO: 25447 - DNA, 201 bp, Homo sapiens
aggtcgcttcttagaaatattctgtctcttgatttgttgggacaggaagcttccccagtaaatgcttctttttttgtttgtggtttttcgtttttttttgkttttttttttttttttttttttttaagaaagggtctcaccctgttgccctggctgcagtgcagtggcaaaatcatagcccactgtagcctcgacaccctg

SEQ ID NO: 25448 - DNA, 201 bp, Homo sapiens
gcctggctctgagggtgcaggtgggacccacagctgggcctcttacaggagccgactgcggtgtggaggtggacgagtgtgcctcacggccatgcctcaayggaggccactgccaggacctgcccaatggcttccagtgtcactgcccagatggctacgcaggtgtctggggtggggtgggccctgggaccatcagaattg

SEQ ID NO: 25449 - DNA, 201 bp, Homo sapiens
agcagtgccggcctctgccttgtgtccacggagggtcctgtgtggatctgtggactcatttccgttgcgactgtgcccggccccatagaggtcccacgtgygctgatggtgaggaataagccaggtgggaaggcagcacctgagatctgcctccctcagcctgcaggcctcacacctggcaccttctctccctgcagagat

SEQ ID NO: 25450 - DNA, 201 bp, Homo sapiens
acttcaccggctgcttgggccgcgtggcgctgggcggcctgcccctgcccttggcgcggccccggcccggcgcggcccctggcgcccgagagcacttcgcstcttggcctgggacgccggccccgatcctcggctgccgcggcgcgcccgtgtgtgcgccctcgccctgtctgcacgacggtgcctgccgtgacctcttcg

SEQ ID NO: 25451 - DNA, 201 bp, Homo sapiens
aggccatggcctgcccggcgctgtgctgcccataccggggccgcgcgtggccgatggtgcctggcaccgcgtgcgtctggccatggagcgcccggcggccrccacctcgcgctggctgctgtggctggatggtgccgccaccccggtggcgctgcgcggcctggccagtgacctgggcttcctgcagggcccgggtgctgt

SEQ ID NO: 25452 - DNA, 201 bp, Homo sapiens
ctccgcactcgggagtccgctggcctgttgctccagtttgccaatgactccgcagctggcctaacagtattcctgagtgagggtcggatccgggctgaggygccgggcagtcctgctgtagtgctccctgggcgctgggatgatgggctccgtcacctggtgatgctcagcttcgggcctgaccagctgcaggacctgggg

SEQ ID NO: 25453 - DNA, 201 bp, Homo sapiens
gagaccaacctggccaacatggtgaaacgccttttctacaaaaaaatacaaaaattagccgggtgaggtggcatgcacctgtaatcccagctactctgcartctgaggcacaagaatcacttgaacccagtgggcagagattgcagtgggctaagattgcagcactgcactccagcctgggcgacagagtgagactctgtc

SEQ ID NO: 25454 - DNA, 201 bp, Homo sapiens
ggtgaggtggcatgcacctgtaatcccagctactctgcaatctgaggcacaagaatcacttgaacccagtgggcagagattgcagtgggctaagattgcascactgcactccagcctgggcgacagagtgagactctgtctcaaaaaaataaaaaacaaaaacaaacccaaaacaactaactaaaatgtaggtgggaccaa

SEQ ID NO: 25455 - DNA, 201 bp, Homo sapiens
gagagtggtggctatacctgtgggcccatggagccccggggctgtgccacccagccatgccaccacggcgctctgtgtgtgccccagggtccagatcccamcggcttccgctgctactgcgtgccgggtttccagggcccacgctgcgagctggacatcgatgagtgtgcatcccggccgtgccaccatggggccacctgc

SEQ ID NO: 25456 - DNA, 201 bp, Homo sapiens
gcgggaggtgctggagtgcgcatcggcgccctgcgagcacaacgcgtcctgcctcgagggcctcgggagcttccgctgcctctgttggccaggtgtgtgcrtgcaggtgcgcggcctggcggggggaggggtaggtgtgcgcctgtgcggcctggggcggtggggcaggtgtgtggctgcacgcgagtgcccgctgggtcc

SEQ ID NO: 25457 - DNA, 201 bp, Homo sapiens
cctcccccgccccccaggatcctttccccggtgctgcctccccagcgtggtcccagctgctctgagatagggggcaaagcttcagattggatgggcggggrggcggggggggttccttgcactgcacaggtgagggacagtgctctgtgggaattaagtgagggacctgttggcacaggcgctggcagccggggcccttta

SEQ ID NO: 25458 - DNA, 201 bp, Homo sapiens
gcgccctgcgagcacaacgcgtcctgcctcgagggcctcgggagcttccgctgcctctgttggccaggtgtgtgcgtgcaggtgcgcggcctggcgggggsaggggtaggtgtgcgcctgtgcggcctggggcggtggggcaggtgtgtggctgcacgcgagtgcccgctgggtcctcgggaccagagtgtgtgtgtgatt

SEQ ID NO: 25459 - DNA, 201 bp, Homo sapiens
ctcgaaggtgcgacgcctgggaagcccttggggagggcctgacagctgcaaagggctcagtaattaatgctagtaatagtagtaagactaggccgggcgcrgtggctcaagcctgtaatcccagcactttgggaggctgaggcgggcggatcacgaggtcaggagttcaagaccagcctggccaacattgtgaaaccccat

SEQ ID NO: 25460 - DNA, 201 bp, Homo sapiens
tgttgaggggggttgtaagtttcggggttgggggatcgggggctgggcatgatttgggggagctgatgcgggtgagggatggggtgcgtgttttgggaggktgctgtgttgcatcctgtaaagggctgggggacttctgggtttctaggggctgagtttggggagttgcaggtggcataagcctcaccccagagcttgttc

SEQ ID NO: 25461 - DNA, 201 bp, Homo sapiens
tgcaaagggctcagtaattaatgctagtaatagtagtaagactaggccgggcgcggtggctcaagcctgtaatcccagcactttgggaggctgaggcgggyggatcacgaggtcaggagttcaagaccagcctggccaacattgtgaaaccccatctctactaaaaatacaaaaattagccaagcatggtggcatgtacct

SEQ ID NO: 25462 - DNA, 201 bp, Homo sapiens
taggtcgcttcttagaaatattctgtctcttgatttgttgggacaggaagcttccccagtaaatgcttctttttttgtttgtggtttttcgtttttttttktttttttttttttttttttttttttaagaaagggtctcaccctgttgccctggctgcagtgcagtggcaaaatcatagcccactgtagcctcgacaccct

SEQ ID NO: 25463 - DNA, 201 bp, Homo sapiens
attgtgaaaccccatctctactaaaaatacaaaaattagccaagcatggtggcatgtacctgtagtcctagctactcaggaagctgaggcaggagaatcgyttgaacctgggaggtggaggtgagcagagatcatgccgctgcactccagcctgggcaacagagtgagattctatctcaaaaaaaaaaaaaaaaaattagt

SEQ ID NO: 25464 - DNA, 201 bp, Homo sapiens
gcttcttagaaatattctgtctcttgatttgttgggacaggaagcttccccagtaaatgcttctttttttgtttgtggtttttcgtttttttttgtttttktttttttttttttttttttaagaaagggtctcaccctgttgccctggctgcagtgcagtggcaaaatcatagcccactgtagcctcgacaccctgggctc

SEQ ID NO: 25465 - DNA, 201 bp, Homo sapiens
tctgtctcttgatttgttgggacaggaagcttccccagtaaatgcttctttttttgtttgtggtttttcgtttttttttgtttttttttttttttttttttttttaagaaagggtctcaccctgttgccctggctgcagtgcagtggcaaaatcatagcccactgtagcctcgacaccctgggctcaagccatcctcccac

SEQ ID NO: 25466 - DNA, 201 bp, Homo sapiens
agactagtaatagcagtaataggccactgctgctgaaggctgccgtggtcattcctgcggcccttagtgtgtccctccctcgccattcgtggcttattccragctgcggtcccttgctggccctcgctagcctggtcatagtgaagaggtgctgcccggcaaccccgtgagacctgatgtccgcgtgtgtgtgcccccagg

SEQ ID NO: 25467 - DNA, 201 bp, Homo sapiens
gataactcaagccagcccagcgagctcggcggcaggcagtcctggaacctcactgcgggctgcgtctccgaggacatgtgcagtgtaagtgtctggtggcrgtggtggtggtggggtggggagtccttttcccaggatctgtcctgtgtcaccggggcttagtgtgtccttttgctgatgaggaaactgaggctcaggagg

SEQ ID NO: 25468 - DNA, 201 bp, Homo sapiens
gtgaacctccccgccacaccccttcctggggcggggtggggggagtgggtgctggcgaggagaggcttggaagggaagtctggggagcagccttgatctcyacaggcttctggcagcctgggtcataaaccacaaatcccctccgcttacggggaatgtttcctttcaagttgaacttttacagcctctggcttccctacc

SEQ ID NO: 25469 - DNA, 201 bp, Homo sapiens
ctgtctcttgatttgttgggacaggaagcttccccagtaaatgcttctttttttgtttgtggtttttcgtttttttttgtttttttttttttttttttttttttaagaaagggtctcaccctgttgccctggctgcagtgcagtggcaaaatcatagcccactgtagcctcgacaccctgggctcaagccatcctcccacc

SEQ ID NO: 25470 - DNA, 201 bp, Homo sapiens
ttaaatgtcagggtgagtgattggacttcaggcggcagaggaacccagcctggcgatgctttagaaatggacctctggctactggtggagatggatgggaragggcttctgaaggctggcgaactgggggatgcgggatggtagcccagacagctggtaaggcaggagatggggggtaggagaaaggggcattggagaatg

SEQ ID NO: 25471 - DNA, 201 bp, Homo sapiens
ggagggtgctgtgttgcatcctgtaaagggctgggggacttctgggtttctaggggctgagtttggggagttgcaggtggcataagcctcaccccagagcytgttctgtgtcgcatgctgggttgtggggcacaggttgtgggtgtgttagagttgggaggtggatgagctgtctggggtgagccgtgagttgtgtccgag

SEQ ID NO: 25472 - DNA, 201 bp, Homo sapiens
tgtctcttgatttgttgggacaggaagcttccccagtaaatgcttctttttttgtttgtggtttttcgtttttttttgtttttttttttttttttttttttttaagaaagggtctcaccctgttgccctggctgcagtgcagtggcaaaatcatagcccactgtagcctcgacaccctgggctcaagccatcctcccacct

SEQ ID NO: 25473 - DNA, 201 bp, Homo sapiens
cgccatgctgcgggtttcctgtgccactgccctcctggctttgagggtgagcccctgctggggaagcggtcagcccatgtccagatgcccagggagggatsttgtgcccacccccccaccccccccacccccccaccccacaccccacacccgagtctgccctctctcttggactcagtctctctagctatagaatggacc

SEQ ID NO: 25474 - DNA, 201 bp, Homo sapiens
gtctcttgatttgttgggacaggaagcttccccagtaaatgcttctttttttgtttgtggtttttcgtttttttttgtttttttttttttttttttttttttaagaaagggtctcaccctgttgccctggctgcagtgcagtggcaaaatcatagcccactgtagcctcgacaccctgggctcaagccatcctcccacctc

SEQ ID NO: 25475 - DNA, 201 bp, Homo sapiens
tctcttgatttgttgggacaggaagcttccccagtaaatgcttctttttttgtttgtggtttttcgtttttttttgtttttttttttttttttttttttttaagaaagggtctcaccctgttgccctggctgcagtgcagtggcaaaatcatagcccactgtagcctcgacaccctgggctcaagccatcctcccacctca

SEQ ID NO: 25476 - DNA, 201 bp, Homo sapiens
cttgatttgttgggacaggaagcttccccagtaaatgcttctttttttgtttgtggtttttcgtttttttttgtttttttttttttttttttttttttaaraaagggtctcaccctgttgccctggctgcagtgcagtggcaaaatcatagcccactgtagcctcgacaccctgggctcaagccatcctcccacctcagcc

SEQ ID NO: 25477 - DNA, 201 bp, Homo sapiens
cgttctcacagcagccgagcagagcgcagagcgggctgccatggcgctggccaggcctgggaccccggacccccaggccctggcctctgtcctgctactgytgctctgggcccctgccctttccctcctggctggtgagttggggcccatgtctggaggggcctgggagagggtctgtcccccaagacagataccccaagc

SEQ ID NO: 25478 - DNA, 201 bp, Homo sapiens
ccccgccccccaggatcctttccccggtgctgcctccccagcgtggtcccagctgctctgagatagggggcaaagcttcagattggatgggcgggggggcggggggggttccttgcactgcacaggtgagggacagtgctctgtgggaattaagtgagggacctgttggcacaggcgctggcagccggggccctttaccat

SEQ ID NO: 25479 - DNA, 201 bp, Homo sapiens
ttctgcccaaaagagaatttcaccctttcctgatgactgagtgagtgtctgcaagcctccatggttattcagccctacccttgtagggtagagccttgggrcccagggatattagatgaacaatttcttcccctatgctagaagttcccacaccttatgagatcttaggtcgcttcttagaaatattctgtctcttgattt

SEQ ID NO: 25480 - DNA, 201 bp, Homo sapiens
ttctgtgaaacccatgcaccctgcttagctcctgccgggtgttcaataaacgcccatctctgtccttctagccagaactcctttgttgtataggcctcccygagcagtggctgtgacaggtggtttcctggcacttgcctgcacacccctggggctgggtcttcactgctcccagggcagcctgctcccagctctgatttt

SEQ ID NO: 25481 - DNA, 201 bp, Homo sapiens
cttactgggacctggcttgcagacccctggccctctgtccatactgtgcatgcagagacccacgttgcttttggggtctggggtgggcctgagagggtggrgaggagattgtccttgtaacctctgcccaccctgcccagccagtttcttctttctacagggacggtgccttcagagccccccagtgcctgtgcctcagac

SEQ ID NO: 25482 - DNA, 201 bp, Homo sapiens
cactctggagctacagcaccactgtgcttgtcctgagactgccggacctggccctaaacgatggccattggcaccaggtggaggttgtgctccatctagcraccctggagctacggctctggcatgagggctgccctgcccggctctgtgtggcctctggtcctgtggccctggcttccacggcttcggcaactccgctgc

SEQ ID NO: 25483 - DNA, 201 bp, Homo sapiens
ctccctccctttaggccatgctgggcatgggggaggccagtgcctggcattcctgagcaggctccgaaggaggcagctgggccaggcagggagctctgccycctccccacttccccagcctcagtgcccgcccaccactctcaacctgtctggagggcatggcaatggagccgggggctctgtggaccttcctgggccacc

SEQ ID NO: 25484 - DNA, 201 bp, Homo sapiens
aggcacagagtggatggaggctgtggggggtctggacactggtgtgtacactcaacccatcaggcctgctgggttgcccaggggcagcctttcctctgccrtttctgtgctgggagcgccatccctggggatccctaaaagttggtggggtacactgcaggcatgaccatttctgcatgctggtaccctagactgcctgcc

SEQ ID NO: 25485 - DNA, 201 bp, Homo sapiens
attagtgtacatgccagtgcaggtcacattcgtccatgtgtctcctagttccaagttctgttttgcatctgtaaagatctgccagtacctgggggtgtctvcagtctgagtgcatgtgtgggcagtgggttgttcgggcagtgggttgtgtgggcagtgggttgtgcgggcagtgggttgtgcgggcagtgggttgtgcat

SEQ ID NO: 25486 - DNA, 201 bp, Homo sapiens
tgggtgtccatcctgcaccctgtgtgtcccctgccctgtccaggcgtgacctgcgagatggaggtggacgagtgcgcctcagcgccctgcctgcacggggsctcgtgcctggacggcgtgggctccttccgctgtgtgtgcgcgccaggctacgggggcacccgttgccagctggacctcgacgagtgccagagccagccg

SEQ ID NO: 25487 - DNA, 201 bp, Homo sapiens
gtacatgccagtgcaggtcacattcgtccatgtgtctcctagttccaagttctgttttgcatctgtaaagatctgccagtacctgggggtgtctgcagtcdgagtgcatgtgtgggcagtgggttgttcgggcagtgggttgtgtgggcagtgggttgtgcgggcagtgggttgtgcgggcagtgggttgtgcatccggat

SEQ ID NO: 25488 - DNA, 201 bp, Homo sapiens
tacatgccagtgcaggtcacattcgtccatgtgtctcctagttccaagttctgttttgcatctgtaaagatctgccagtacctgggggtgtctgcagtctgagtgcatgtgtgggcagtgggttgttcgggcagtgggttgtgtgggcagtgggttgtgcgggcagtgggttgtgcgggcagtgggttgtgcatccggatg

SEQ ID NO: 25489 - DNA, 201 bp, Homo sapiens
atcttaggtcgcttcttagaaatattctgtctcttgatttgttgggacaggaagcttccccagtaaatgcttctttttttgtttgtggtttttcgtttttktttgtttttttttttttttttttttttttaagaaagggtctcaccctgttgccctggctgcagtgcagtggcaaaatcatagcccactgtagcctcgaca

SEQ ID NO: 25490 - DNA, 201 bp, Homo sapiens
atgccagtgcaggtcacattcgtccatgtgtctcctagttccaagttctgttttgcatctgtaaagatctgccagtacctgggggtgtctgcagtctgagtgcatgtgtgggcagtgggttgttcgggcagtgggttgtgtgggcagtgggttgtgcgggcagtgggttgtgcgggcagtgggttgtgcatccggatgtgt

SEQ ID NO: 25491 - DNA, 201 bp, Homo sapiens
atgggggtggggggaggaatggaggctgtgtcttctggaggctctcctcccccatcccttaccgagttgttaccaaaagcagcccttgactgcggtgctgrggagctgaatagttcagcatttgatgaggggattcttttatgatctaattttcagactgggaaacggaggctctgtaggagaaatgacttacccagggtc

SEQ ID NO: 25492 - DNA, 201 bp, Homo sapiens
tgccagtgcaggtcacattcgtccatgtgtctcctagttccaagttctgttttgcatctgtaaagatctgccagtacctgggggtgtctgcagtctgagtscatgtgtgggcagtgggttgttcgggcagtgggttgtgtgggcagtgggttgtgcgggcagtgggttgtgcgggcagtgggttgtgcatccggatgtgta

SEQ ID NO: 25493 - DNA, 201 bp, Homo sapiens
ggaagctgaggcaggagaatcgcttgaacctgggaggtggaggtgagcagagatcatgccgctgcactccagcctgggcaacagagtgagattctatctcaaaaaaaaaaaaaaaaaattagtagtaagactagtaatagcagtaataggccactgctgctgaaggctgccgtggtcattcctgcggcccttagtgtgtcc

SEQ ID NO: 25494 - DNA, 201 bp, Homo sapiens
atgtgcgagagcatgtccctggctgagctgagcacagtcccactcgtctgtcccaggggaccggaacacggagcaggaggagggcggtgaggcggtgcacraggtggaggtggtcatcaagcacaaccggttcacaaaggagacctatgacttcgacatcgccgtgctccggctcaagacccccatcaccttccgcatgaa

SEQ ID NO: 25495 - DNA, 201 bp, Homo sapiens
gcattcctttccccagataccttcctgcatctgggtcacgcccagaggcagatgggagcctgtgcaggccccgtggcgtcgggaggggcccacacgttggsgcagcctccccaagaccccccacttggcctggtctctcttgttcctcttgggaattggacacctccccggtgactgcctatgacccgcagactccctggg

SEQ ID NO: 25496 - DNA, 201 bp, Homo sapiens
atatgcccgggctccaaacttgcaagtccagctccctagggacagcatgtggcacccctgtcagtgcttgctcccctgggaccgtgttccaagtcctggcrggtaggagacccttcacaggagctgccacagggacccccaggaagtcacctgggatggaggtgtccgtgcaccatgggggacaggctcacactgctgaac

SEQ ID NO: 25497 - DNA, 201 bp, Homo sapiens
caagtgtgggccgggtgcagtagctcatgcctgtaatcccagcattttgggaggccaaggcgggcggatcatgaggtcaggagatcgagaccatcctggcyaacacagtgaaaccccgtctctagtaaaaataccaaaaaaaaaaaaattagctgggcgtggtggtgcacgcctgtagtcccagctgctcaggaggctgag

SEQ ID NO: 25498 - DNA, 201 bp, Homo sapiens
aggggaccggaacacggagcaggaggagggcggtgaggcggtgcacgaggtggaggtggtcatcaagcacaaccggttcacaaaggagacctatgacttcracatcgccgtgctccggctcaagacccccatcaccttccgcatgaacgtggcgcctgcctgcctccccgagcgtgactgggccgagtccacgctgatgac

SEQ ID NO: 25499 - DNA, 201 bp, Homo sapiens
ttaaaaaacaataagcctgtggacattttttagcgtaatctaggctcttgatgacctgttttaaactaatcagcaatgaatatttttcagctaacgtaatsactattgacaagcacgtgacccttgtctgaatgttaactcaggcatagcaactaaaaaccatccattgaccagctcgggagtagcaaacagagcaagcca

SEQ ID NO: 25500 - DNA, 201 bp, Homo sapiens
ttcgcatggccttctctctctgtgcctctgtgtgactttttctgtctcttataaggactttctcctttatttagggcccacactgacccagcatgatctcwtctacagccttggcttagttaacatctgcaaagacccgatttccaattaaggttctattctgaggctgcaggtggacctgaattagcagggagggcacta

SEQ ID NO: 25501 - DNA, 201 bp, Homo sapiens
catcaatgaggaaaacgagggtttctgtggtggaactattctgagcgagttctacatcctaacggcagcccactgtctctaccaagccaagagattcaagrtgagggtaggtaagtgaccaacagcccccagggccgtggtggggggcaccgtcactgtctgcttttcagaaaccactaaagctgatggaatttgttggga

SEQ ID NO: 25502 - DNA, 201 bp, Homo sapiens
ggaaaacgagggtttctgtggtggaactattctgagcgagttctacatcctaacggcagcccactgtctctaccaagccaagagattcaaggtgagggtasgtaagtgaccaacagcccccagggccgtggtggggggcaccgtcactgtctgcttttcagaaaccactaaagctgatggaatttgttgggaacactggtt

SEQ ID NO: 25503 - DNA, 201 bp, Homo sapiens
tgctcatcaatgaggaaaacgagggtttctgtggtggaactattctgagcgagttctacatcctaacggcagcccactgtctctaccaagccaagagattyaaggtgagggtaggtaagtgaccaacagcccccagggccgtggtggggggcaccgtcactgtctgcttttcagaaaccactaaagctgatggaatttgtt

SEQ ID NO: 25504 - DNA, 201 bp, Homo sapiens
attataattcccttctgccaataataaataataagtgactaaggtgtttttgaagctcaagattgcttgattctgcagtcttgttttaaattttggacatrgagagtttggagttctgagatgagggaaggcatctgtcatagtgagagagctgaaaacatggagctcaggacaaaagtcagtgctagagagatcagttgg

SEQ ID NO: 25505 - DNA, 201 bp, Homo sapiens
actggaggtaggaatgaacccaagatttactaagcaccttctgtataccaaactcaacactaggagtttatacaatctttaaaacagctctaagagtagayattataattcccttctgccaataataaataataagtgactaaggtgtttttgaagctcaagattgcttgattctgcagtcttgttttaaattttggacat

SEQ ID NO: 25506 - DNA, 201 bp, Homo sapiens
gagcgagttctacatcctaacggcagcccactgtctctaccaagccaagagattcaaggtgagggtaggtaagtgaccaacagcccccagggccgtggtgrggggcaccgtcactgtctgcttttcagaaaccactaaagctgatggaatttgttgggaacactggttgaaatcctgaaatcctatttgtaggggttaggg

SEQ ID NO: 25507 - DNA, 201 bp, Homo sapiens
cgagtccacgctgatgacgcagaagacggggattgtgagcggcttcgggcgcacccacgagaagggccggcagtccaccaggctcaagatgctggaggtgycctacgtggaccgcaacagctgcaagctgtccagcagcttcatcatcacccagaacatgttctgtgccggctacgacaccaagcaggaggatgcctgcca

SEQ ID NO: 25508 - DNA, 201 bp, Homo sapiens
gcaggaggatgcctgccagggggacagcgggggcccgcacgtcacccgcttcaaggacacctacttcgtgacaggcatcgtcagctggggagagggctgtrcccgtaaggggaagtacgggatctacaccaaggtcaccgccttcctcaagtggatcgacaggtccatgaaaaccaggggcttgcccaaggccaagagcca

SEQ ID NO: 25509 - DNA, 201 bp, Homo sapiens
atggcagtcagggagcataggtgagggggagcctgggtgagggtgaccagagcttttaaccctgtcctccctgccttccagtgttcatccgcagggagcasgccaacaacatcctggcgagggtcacgagggccaattcctttcttgaagagatgaagaaaggacacctcgaaagagagtgcatggaagagacctgctcat

SEQ ID NO: 25510 - DNA, 201 bp, Homo sapiens
agagaatggcgtgaacctggaaggcggagcttgcactgagcactgagccgagattgcgccactgcgctccagcctgggcaacagaatgagactctgtctcaaaaaaaaaaaaaaaaaaaaaatcaaaaggcaaatgtgatgtgtgaaaataaaattacataatctactttgtagtgcaaaaagttcaggctgggcaaggtg

SEQ ID NO: 25511 - DNA, 201 bp, Homo sapiens
gtttagaaggattcgaaggcaaaaactgtgaattatgtaggttcctctgcttggtataccttcagatcagatgcccctgaagagtggcaggtgggcggggraagaagtgaaaacgcctaatgaaacaatcttaagtcatttctgatttacaaagtctgggctctattatacctattatactgtgccactatagcaatagaa

SEQ ID NO: 25512 - DNA, 201 bp, Homo sapiens
ggcccaggtggttcaaacatgaagaccatgaggtttggaaacagacccattatttctgtaagccagatctgctgtttaacctcagcttccccatctgacaratgggaccaacactattgcctgactgcttgggtgatccctggagcactttgcacgatgcctggcccaccgcaggccctcagtctgcattgggactgtggg

SEQ ID NO: 25513 - DNA, 201 bp, Homo sapiens
caccttccgcatgaacgtggcgcctgcctgcctccccgagcgtgactgggccgagtccacgctgatgacgcagaagacggggattgtgagcggcttcgggygcacccacgagaagggccggcagtccaccaggctcaagatgctggaggtgccctacgtggaccgcaacagctgcaagctgtccagcagcttcatcatcac

SEQ ID NO: 25514 - DNA, 201 bp, Homo sapiens
acgtgcctctcctttgcagtcacacggaagctctgcagcctggacaacggggactgtgaccagttctgccacgaggaacagaactctgtggtgtgctcctrcgcccgcgggtacaccctggctgacaacggcaaggcctgcattcccacaggtaggaggcacgttgggccacagccacccgctgccgctgggccgggccag

SEQ ID NO: 25515 - DNA, 201 bp, Homo sapiens
gcacaaccggttcacaaaggagacctatgacttcgacatcgccgtgctccggctcaagacccccatcaccttccgcatgaacgtggcgcctgcctgcctcyccgagcgtgactgggccgagtccacgctgatgacgcagaagacggggattgtgagcggcttcgggcgcacccacgagaagggccggcagtccaccaggct

SEQ ID NO: 25516 - DNA, 201 bp, Homo sapiens
ttcccagcgtggtcactcccctgcctcgccagcaggtctcggctccaatcaggaggcctaagccaagtgataagcagccagacaacagccatcccagctgrggcgtggactttgctccagcagcctgtcccagtgaggacagggacacagtactcggccacaccatggggcgcccactgcacctcgtcctgctcagtgcct

SEQ ID NO: 25517 - DNA, 201 bp, Homo sapiens
acaaaaatgaatatgtaacataaaatctgtgggatgcagctaaaaaagcagtgtttcaagggaaatttatagcattaaatgctcacatgggaaaagaaagrcggtctcaaattgtttatgtaagcttccactttaataaactagaaaaaaagaaaaaaataaaccaaaaggaaattgaaaaagcagaaatcaaagaaattt

SEQ ID NO: 25518 - DNA, 201 bp, Homo sapiens
cggacgacgaacccagcatcgcgcctgcgcagtaggaggagagcaatgccaccaggccgcgattgcgcagccgcagcagccccgcgcggaagacgctaccytcctctcccccgaagaggcggggcttcgaacgaacctggaaatggccgaggggtctcgacttcctcaccccaggcatcaggaaaggtgcctgcaggacag

SEQ ID NO: 25519 - DNA, 201 bp, Homo sapiens
gagccaacgtgcctctcctttgcagtcacacggaagctctgcagcctggacaacggggactgtgaccagttctgccacgaggaacagaactctgtggtgtrctcctgcgcccgcgggtacaccctggctgacaacggcaaggcctgcattcccacaggtaggaggcacgttgggccacagccacccgctgccgctgggccg

SEQ ID NO: 25520 - DNA, 201 bp, Homo sapiens
cagccccgcgcggaagacgctaccctcctctcccccgaagaggcggggcttcgaacgaacctggaaatggccgaggggtctcgacttcctcaccccaggcrtcaggaaaggtgcctgcaggacagggctctgaagtggaagtgggcggtggtgatgccgaactgacaagaatgagctgaagagaagaaagtagccgagaag

SEQ ID NO: 25521 - DNA, 201 bp, Homo sapiens
ggccgcgaacccggcactgcgcctgcgcagcaaaaggacacgcactgaggccaggccgcgaacccagcacggtgcctgcgcagcaggaagaccggcatccmcaccggacgacgaacccagcatcgcgcctgcgcagtaggaggagagcaatgccaccaggccgcgattgcgcagccgcagcagccccgcgcggaagacgct

SEQ ID NO: 25522 - DNA, 201 bp, Homo sapiens
agaggcccgcgaggtctttgaggacagcgacaagacggtaagggctggggatagcctggctgttggtaaggagctcaggccacagcgccctcgctggcccygctgctccgtccatccaggggggcggcctggaggaaggggcagcgtgcgcgaaggctttcaggggcggggcccagcaaatcgaggcctcggcggagtcct

SEQ ID NO: 25523 - DNA, 201 bp, Homo sapiens
tcagaccccaactggagcccaggaggcccgcgagtcccagtttgggaaacactaagccaggcttggataacttgtctgaggctgtggtcatcccaacatgwgagccagaggccccaagggagatgggcattccccacccctcagcttcctcagtgccttttgtggagtggaggtgacatgaggctgcaggttgcagggagc

SEQ ID NO: 25524 - DNA, 201 bp, Homo sapiens
tcatcatcacccagaacatgttctgtgccggctacgacaccaagcaggaggatgcctgccagggggacagcgggggcccgcacgtcacccgcttcaaggayacctacttcgtgacaggcatcgtcagctggggagagggctgtgcccgtaaggggaagtacgggatctacaccaaggtcaccgccttcctcaagtggatcg

SEQ ID NO: 25525 - DNA, 201 bp, Homo sapiens
gttccaattccagataagatgaagaaatcacattccacactgcctctcccactgagtgtagctccaaaacatggatagaatgcatgtagcagctatttgasgaccctaaaaagtaaatcgcagtgtattgcagaataagactacaattagatgtatgatatgatacaactggctgtgagtttatcattttttcctccagtc

SEQ ID NO: 25526 - DNA, 201 bp, Homo sapiens
gccacagcctagagcgccagcgcgcaggcgcacaactgacgccaggccacgaacccagtactgcgcctgcacagcagaagcactagcactgaggccgggcsgcgaacccggcactgcgcctgcgcagcaaaaggacacgcactgaggccaggccgcgaacccagcacggtgcctgcgcagcaggaagaccggcatccccac

SEQ ID NO: 25527 - DNA, 201 bp, Homo sapiens
gcccgcgtcctgccttggcctccgtagtcgctgagagccacagcctagagcgccagcgcgcaggcgcacaactgacgccaggccacgaacccagtactgckcctgcacagcagaagcactagcactgaggccgggccgcgaacccggcactgcgcctgcgcagcaaaaggacacgcactgaggccaggccgcgaacccagc

SEQ ID NO: 25528 - DNA, 201 bp, Homo sapiens
ctgactccttcccggcgaggactcagcggggagggatgcgcccaagtcccttgagggtcacagggcttctgccagagttaagttctatttaaaaataaaakgttaacctaaaaaccaatagtcatggtctcggccagcgcctcgccgagttgcagtgagctgagatcgtgccctcccacgcccgcagcccgcgtcctgcct

SEQ ID NO: 25529 - DNA, 201 bp, Homo sapiens
aagaacctcgatgcaggagaccccaccgaggatgagcaggaaaagcctcttgtggggctgaggagctggacttggagctgcaggcggggttttggaggggktcctgggctgggggaccagggtggggcgccctggagggctcactggaggggccctcgcccagcctgttgaggtttgcgattcttgtttcctggttcgagt

SEQ ID NO: 25530 - DNA, 201 bp, Homo sapiens
cgacgacgtggggcctcgccctgcaagcccgctgcccctccgggtgcccctgcgctctgcctcccggctctctgactcttctccctcagggtgagctgtgyaggctatggggagcctctctctgtgctgaaggccccggccgtcctctttctttcagggccctacccctgtgggaaacagaccctggaacgcaggaagagg

SEQ ID NO: 25531 - DNA, 201 bp, Homo sapiens
ggatatgaaaccatgaagcctctctgtgaccaatacacagaaatctcaacctagttagggagctgagaccgaaatcctcccagtcccaggcactgtgtggytggggcaagaacctcgatgcaggagaccccaccgaggatgagcaggaaaagcctcttgtggggctgaggagctggacttggagctgcaggcggggttttg

SEQ ID NO: 25532 - DNA, 201 bp, Homo sapiens
attaggaaaagttttccaacacacagcacactggaaagaattttgcagggagtcgcacacgcccagcacttgggttctcctgttggcatcctccggccagrtgcattcatcccatttcgcccggcccgtttgtctctgtccatccgtcaagctttcttgacttcttggtgcattttcaggcaaaccgcagacgccaacact

SEQ ID NO: 25533 - DNA, 201 bp, Homo sapiens
agcgacaagacggtaagggctggggatagcctggctgttggtaaggagctcaggccacagcgccctcgctggccccgctgctccgtccatccaggggggcrgcctggaggaaggggcagcgtgcgcgaaggctttcaggggcggggcccagcaaatcgaggcctcggcggagtcctgcccacagggacatcagtgccgccc

SEQ ID NO: 25534 - DNA, 201 bp, Homo sapiens
caaaaaaaaaaaaaagttcagttccaaataatggatgaactcagaacttggaagggtggtgactgcacacatggacagagctgaggcacggcggggtggargcccctgcggctggcagattcaccggagcctcctcagactgcgcaggagcacagcaagtaaacagctaagctgtgcccatctgaccccagacacgtgtgg

SEQ ID NO: 25535 - DNA, 201 bp, Homo sapiens
gaggtctttgaggacagcgacaagacggtaagggctggggatagcctggctgttggtaaggagctcaggccacagcgccctcgctggccccgctgctccgyccatccaggggggcggcctggaggaaggggcagcgtgcgcgaaggctttcaggggcggggcccagcaaatcgaggcctcggcggagtcctgcccacaggg

SEQ ID NO: 25536 - DNA, 201 bp, Homo sapiens
aacagctgcaagctgtccagcagcttcatcatcacccagaacatgttctgtgccggctacgacaccaagcaggaggatgcctgccagggggacagcggggrcccgcacgtcacccgcttcaaggacacctacttcgtgacaggcatcgtcagctggggagagggctgtgcccgtaaggggaagtacgggatctacaccaag

SEQ ID NO: 25537 - DNA, 201 bp, Homo sapiens
agagagatgtggacagcacagcccacagacacacactctacaagggacacagactctcggatccagggcattttaaccagcagatcaagactcatttgccmgtcatgaaatcaactcagtatttttttttaaaagagtagaatcaaatagaaaactttgtactaagtactgtattttaggaaatactaataaatactattt

SEQ ID NO: 25538 - DNA, 201 bp, Homo sapiens
gaaggccccggccgtcctctttctttcagggccctacccctgtgggaaacagaccctggaacgcaggaagaggtcagtggcccaggccaccagcagcagcrgggaggcccctgacagcatcacatggaagccatatgatgcagccgacctggaccccaccgagaaccccttcgacctgcttgacttcaaccagacgcagcc

SEQ ID NO: 25539 - DNA, 201 bp, Homo sapiens
ctgccttccagtgttcatccgcagggagcaggccaacaacatcctggcgagggtcacgagggccaattcctttcttgaagagatgaagaaaggacacctcraaagagagtgcatggaagagacctgctcatacgaagaggcccgcgaggtctttgaggacagcgacaagacggtaagggctggggatagcctggctgttgg

SEQ ID NO: 25540 - DNA, 201 bp, Homo sapiens; identical to SEQ ID NO: 18375

SEQ ID NO: 25541 - DNA, 201 bp, Homo sapiens
ggcgcaagggatcgaccagagacagtgagggcgtcaggctccagttgagtggggaccaatccttgtggcaagtctgtgaaccatcactgtggctctagggyagcagagaaaaaagcaggcatatgtccatctggccacaaggaaggagaccaaggggaagagagaaggtaccaagagaggtgttcacatggaggtgcgtca

SEQ ID NO: 25542 - DNA, 201 bp, Homo sapiens
tggccacgtggcccagacccggcctgctcagtctgactgaagcgttgatgcgactcagccataacagatagcagaagcgcccagattcagtccagagggcygagccaggcacgccatctttccttcattccctcaacacatattggttaagttccggccgtgctaggcacgggcatacagctgtgaccaaacacgtcaagt

SEQ ID NO: 25543 - DNA, 201 bp, Homo sapiens
aaggtcagtattttttctgttttaaccttcagtgagaggggttcatcaggatatttgaattttgaaaatagttcctgaatttcctttctgcttttgttctmattttactcatttaagactttttccctcagggtgtttccataatagttattgtaaaagagtttttagagtaattttatactaatcctagttttgttattg

SEQ ID NO: 25544 - DNA, 201 bp, Homo sapiens
caaaatcaaggcgtcagcggggctggttcctccagaggctgggagagagtctgctctaggcctgtttcctggcctcggggtgccagcggcctcacagcccrtggcttgtgggagcattgctcccatcgctgcctccatcatcgcatggggttctcaccatggctgtttttctgtcttcttttctctcagaaggacaccagt

SEQ ID NO: 25545 - DNA, 201 bp, Homo sapiens
ttgctcaacccaatggccgctttgtggctgacaggcaagtggatgtagctggcacccttgggccagcccagcctccatttctccagctgtccccagagccracgtgcctctcctttgcagtcacacggaagctctgcagcctggacaacggggactgtgaccagttctgccacgaggaacagaactctgtggtgtgctcct

SEQ ID NO: 25546 - DNA, 201 bp, Homo sapiens
ggaacaaggccctggaaggacccatgccatcatcatcgacagcaaagctactctgcaaacagacagatgcttccgcgaattggtagaaaattctgcagccrgaatgctctaggatcctgaggccctaagcccggcccggggctcccgaggccctaagcccggcccgggactctggaagctgctctggcttattgggaatgg

SEQ ID NO: 25547 - DNA, 201 bp, Homo sapiens
ctggcacccttgggccagcccagcctccatttctccagctgtccccagagccaacgtgcctctcctttgcagtcacacggaagctctgcagcctggacaayggggactgtgaccagttctgccacgaggaacagaactctgtggtgtgctcctgcgcccgcgggtacaccctggctgacaacggcaaggcctgcattccca

SEQ ID NO: 25548 - DNA, 201 bp, Homo sapiens
gtgctccggctcaagacccccatcaccttccgcatgaacgtggcgcctgcctgcctccccgagcgtgactgggccgagtccacgctgatgacgcagaagayggggattgtgagcggcttcgggcgcacccacgagaagggccggcagtccaccaggctcaagatgctggaggtgccctacgtggaccgcaacagctgcaag

SEQ ID NO: 25549 - DNA, 201 bp, Homo sapiens
tgcctgcctccccgagcgtgactgggccgagtccacgctgatgacgcagaagacggggattgtgagcggcttcgggcgcacccacgagaagggccggcagyccaccaggctcaagatgctggaggtgccctacgtggaccgcaacagctgcaagctgtccagcagcttcatcatcacccagaacatgttctgtgccggcta

SEQ ID NO: 25550 - DNA, 201 bp, Homo sapiens
ggaggatgcctgccagggggacagcgggggcccgcacgtcacccgcttcaaggacacctacttcgtgacaggcatcgtcagctggggagagggctgtgccsgtaaggggaagtacgggatctacaccaaggtcaccgccttcctcaagtggatcgacaggtccatgaaaaccaggggcttgcccaaggccaagagccatgc

SEQ ID NO: 25551 - DNA, 201 bp, Homo sapiens
tggcaagggacatggcagtcagggagcataggtgagggggagcctgggtgagggtgaccagagcttttaaccctgtcctccctgccttccagtgttcatcygcagggagcaggccaacaacatcctggcgagggtcacgagggccaattcctttcttgaagagatgaagaaaggacacctcgaaagagagtgcatggaaga

SEQ ID NO: 25552 - DNA, 201 bp, Homo sapiens
tcaggcaacacctgtccacctggccagccacactgagcctgtcacgtctgtcacaggccctgctcatcaatgaggaaaacgagggtttctgtggtggaacyattctgagcgagttctacatcctaacggcagcccactgtctctaccaagccaagagattcaaggtgagggtaggtaagtgaccaacagcccccagggccg

SEQ ID NO: 25553 - DNA, 201 bp, Homo sapiens
cccaaatggaaactttgaggccccttacaggtcccccagcgcaggccaccgccgaaggttactggggaagacccctgcagcttccatgtggacattactckcttgcttcatcccggagtgcagtcacctgcagcctgggaccacctgactgatgtcaccctggagatccatgccaaaagagctggggaaagttcaccttct

SEQ ID NO: 25554 - DNA, 201 bp, Homo sapiens
gggccggcagtccaccaggctcaagatgctggaggtgccctacgtggaccgcaacagctgcaagctgtccagcagcttcatcatcacccagaacatgttcygtgccggctacgacaccaagcaggaggatgcctgccagggggacagcgggggcccgcacgtcacccgcttcaaggacacctacttcgtgacaggcatcgt

SEQ ID NO: 25555 - DNA, 201 bp, Homo sapiens
agcttttaaccctgtcctccctgccttccagtgttcatccgcagggagcaggccaacaacatcctggcgagggtcacgagggccaattcctttcttgaagrgatgaagaaaggacacctcgaaagagagtgcatggaagagacctgctcatacgaagaggcccgcgaggtctttgaggacagcgacaagacggtaagggct

SEQ ID NO: 25556 - DNA, 201 bp, Homo sapiens
ccagacgcagcctgagaggggcgacaacaacctcaccaggatcgtgggaggccaggaatgcaaggacggggagtgtccctggcaggtaacagtaggatgtyccctcgggcctgctggagagaccacctgtcccgctgtgcacctcggggaggccagcctgacacttggaatagcaatccgggaaggaactgttccgaacta

SEQ ID NO: 25557 - DNA, 201 bp, Homo sapiens
ctcctttgcagtcacacggaagctctgcagcctggacaacggggactgtgaccagttctgccacgaggaacagaactctgtggtgtgctcctgcgcccgcrggtacaccctggctgacaacggcaaggcctgcattcccacaggtaggaggcacgttgggccacagccacccgctgccgctgggccgggccagggaggaca

SEQ ID NO: 25558 - DNA, 201 bp, Homo sapiens
cagtgagtgtgtggcacaggcagagaaaagagacagacaaggaactgtccttgggtggatggcaggagaccgaagaggacagcttggcatggggagggccrggcagtgccacctgaagagctggcttctcagtcaggcaacacctgtccacctggccagccacactgagcctgtcacgtctgtcacaggccctgctcatca

SEQ ID NO: 25559 - DNA, 201 bp, Homo sapiens
ggtgagggtaggtaagtgaccaacagcccccagggccgtggtggggggcaccgtcactgtctgcttttcagaaaccactaaagctgatggaatttgttggsaacactggttgaaatcctgaaatcctatttgtaggggttaggggcatttcacagaggaagaagatgaggaagcagaggaaggggaagagtggggaggagg

SEQ ID NO: 25560 - DNA, 201 bp, Homo sapiens
gacccccatcaccttccgcatgaacgtggcgcctgcctgcctccccgagcgtgactgggccgagtccacgctgatgacgcagaagacggggattgtgagcrgcttcgggcgcacccacgagaagggccggcagtccaccaggctcaagatgctggaggtgccctacgtggaccgcaacagctgcaagctgtccagcagctt

SEQ ID NO: 25561 - DNA, 201 bp, Homo sapiens
ggccaggccgcgaacccagcacggtgcctgcgcagcaggaagaccggcatccccaccggacgacgaacccagcatcgcgcctgcgcagtaggaggagagcratgccaccaggccgcgattgcgcagccgcagcagccccgcgcggaagacgctaccctcctctcccccgaagaggcggggcttcgaacgaacctggaaatg

SEQ ID NO: 25562 - DNA, 201 bp, Homo sapiens
ggagacctatgacttcgacatcgccgtgctccggctcaagacccccatcaccttccgcatgaacgtggcgcctgcctgcctccccgagcgtgactgggccragtccacgctgatgacgcagaagacggggattgtgagcggcttcgggcgcacccacgagaagggccggcagtccaccaggctcaagatgctggaggtgcc

SEQ ID NO: 25563 - DNA, 201 bp, Homo sapiens
tgccttccagtgttcatccgcagggagcaggccaacaacatcctggcgagggtcacgagggccaattcctttcttgaagagatgaagaaaggacacctcgraagagagtgcatggaagagacctgctcatacgaagaggcccgcgaggtctttgaggacagcgacaagacggtaagggctggggatagcctggctgttggt

SEQ ID NO: 25564 - DNA, 201 bp, Homo sapiens
caaactaagagaaaatatttgcaaatcacatatccaacaaaggaatcatattcggaatatataaagaaatcttaacagatcagaagaagaaaataaacacycagttaaacaaaagaccttaacagccaactcgccaaagaggatatatggatagaaaataaacatgtgagaagatactcaacattattagctcttacagaa

SEQ ID NO: 25565 - DNA, 201 bp, Homo sapiens
ggccagctgtggctccctggggctgagagtcagacgggcggatcagaggtcacagagacaaaaacacaaggacagagtcagagagagaaagggagagggarggagaaacggagacacagtgagatgggaggccaagaggcagagacagaggtagaaagacggagacagagagagagggaggggttggggcaggcagagaca

SEQ ID NO: 25566 - DNA, 201 bp, Homo sapiens
gcttgcagactccagtttcgaaatcctctctttgcagatggcgaccagtgtgagaccagtccttgccagaaccagggcaaatgtaaagacggcctcggggmatacacctgcacctgtttagaaggattcgaaggcaaaaactgtgaattatgtaggttcctctgcttggtataccttcagatcagatgcccctgaagagtg

SEQ ID NO: 25567 - DNA, 201 bp, Homo sapiens
gcagatggcgaccagtgtgagaccagtccttgccagaaccagggcaaatgtaaagacggcctcggggaatacacctgcacctgtttagaaggattcgaagrcaaaaactgtgaattatgtaggttcctctgcttggtataccttcagatcagatgcccctgaagagtggcaggtgggcgggggaagaagtgaaaacgccta

SEQ ID NO: 25568 - DNA, 201 bp, Homo sapiens
gaccagtgtgagaccagtccttgccagaaccagggcaaatgtaaagacggcctcggggaatacacctgcacctgtttagaaggattcgaaggcaaaaactrtgaattatgtaggttcctctgcttggtataccttcagatcagatgcccctgaagagtggcaggtgggcgggggaagaagtgaaaacgcctaatgaaacaa

SEQ ID NO: 25569 - DNA, 201 bp, Homo sapiens
ccggttcacaaaggagacctatgacttcgacatcgccgtgctccggctcaagacccccatcaccttccgcatgaacgtggcgcctgcctgcctccccgagygtgactgggccgagtccacgctgatgacgcagaagacggggattgtgagcggcttcgggcgcacccacgagaagggccggcagtccaccaggctcaagat

SEQ ID NO: 25570 - DNA, 201 bp, Homo sapiens
agcctgggtgagggtgaccagagcttttaaccctgtcctccctgccttccagtgttcatccgcagggagcaggccaacaacatcctggcgagggtcacgasggccaattcctttcttgaagagatgaagaaaggacacctcgaaagagagtgcatggaagagacctgctcatacgaagaggcccgcgaggtctttgaggac

SEQ ID NO: 25571 - DNA, 201 bp, Homo sapiens
caccgagaaccccttcgacctgcttgacttcaaccagacgcagcctgagaggggcgacaacaacctcaccaggatcgtgggaggccaggaatgcaaggacrgggagtgtccctggcaggtaacagtaggatgtcccctcgggcctgctggagagaccacctgtcccgctgtgcacctcggggaggccagcctgacacttgg

SEQ ID NO: 25572 - DNA, 201 bp, Homo sapiens
gggagcctgggtgagggtgaccagagcttttaaccctgtcctccctgccttccagtgttcatccgcagggagcaggccaacaacatcctggcgagggtcaygagggccaattcctttcttgaagagatgaagaaaggacacctcgaaagagagtgcatggaagagacctgctcatacgaagaggcccgcgaggtctttgag

SEQ ID NO: 25573 - DNA, 201 bp, Homo sapiens
atactttgaacaactctgcatatataaatttgcatgagatttgaacttggatgaaatgagcctattcttcaataccacaagccaccaaaacatacacaagrtgaaagagatacctgccaattcaattcttaatttaaaaccttctgaaaaagtaatgttcaggtacagatggtttcactggtagaattttaccaaacattt

SEQ ID NO: 25574 - DNA, 201 bp, Homo sapiens
gggcatttcacagaggaagaagatgaggaagcagaggaaggggaagagtggggaggaggacggggaggggaggcgaaccagcccagcccttctcccactgrgtgtccaggtctcgggtctccgagtctctgggtcccgggtctctgggtctgcatgtccagctaatgttctgtgtctcagtgtcttttattgggagccttc

SEQ ID NO: 25575 - DNA, 201 bp, Homo sapiens
gcagtccaccaggctcaagatgctggaggtgccctacgtggaccgcaacagctgcaagctgtccagcagcttcatcatcacccagaacatgttctgtgccrgctacgacaccaagcaggaggatgcctgccagggggacagcgggggcccgcacgtcacccgcttcaaggacacctacttcgtgacaggcatcgtcagctg

SEQ ID NO: 25576 - DNA, 201 bp, Homo sapiens
ccaaaagaatgattaataaaagaaaaaagtcataaattggactttatcaaaattaaaaccttttgcacttcagaaataaacactgttaagaggatgaaaayacaagctacaaactaagagaaaatatttgcaaatcacatatccaacaaaggaatcatattcggaatatataaagaaatcttaacagatcagaagaagaaa

SEQ ID NO: 25577 - DNA, 201 bp, Homo sapiens
gtgacttccattggggaaaatatcctattcagcttgagtcacttaattatggttgttattggtataaaatgtctctgttttccctaatatatttttaaatytcttttttccttttagaatgaattctggaataaatacaaaggtcagtattttttctgttttaaccttcagtgagaggggttcatcaggatatttgaattt

SEQ ID NO: 25578 - DNA, 201 bp, Homo sapiens
cgcctgtaatcccagcactttgggaagccaaggtgggtggatcacctgaggtcaggagttcaagaccagcctggccaacatggtgaaaccctgtctctataaaaaaaaaatacaaaaacttagctgggcgtggtggcgcacgcctgtaatcccagctactcgggaggctgaggcaggagaatcgcctgaacccaggaggtg

SEQ ID NO: 25579 - DNA, 201 bp, Homo sapiens
caggttcatgtcattctcctgcttcagcctcccgagtagctgggactacaggcgcctgccaccacgcccagctaattttttttgtatttttagtagagacrgggtttcaccgtgttagccaggatggtctccatctcctgacctggtgatctgcccacctcagcctcccaaagtgctgggattacaggcgtgagccaatgt

SEQ ID NO: 25580 - DNA, 201 bp, Homo sapiens
agagacggggtttcaccgtgttagccaggatggtctccatctcctgacctggtgatctgcccacctcagcctcccaaagtgctgggattacaggcgtgagmcaatgtgcccggccatgcctggctaatttttttatttttaatagagacaggaatttcaccatgttggccaggctggtctcaaactccaggcctcatgtga

SEQ ID NO: 25581 - DNA, 201 bp, Homo sapiens
accgagaaccccttcgacctgcttgacttcaaccagacgcagcctgagaggggcgacaacaacctcaccaggatcgtgggaggccaggaatgcaaggacgrggagtgtccctggcaggtaacagtaggatgtcccctcgggcctgctggagagaccacctgtcccgctgtgcacctcggggaggccagcctgacacttgga

SEQ ID NO: 25582 - DNA, 201 bp, Homo sapiens
tatctgattcaagtcaaactaggtgtattagtcagttttcacactgctgacacatacatacccgagactgggtaatttataaagaaaaagaggttgaatgractcacagttccacgtggctggggaggcctcaccgtcacggtggaaggcgcaaggcacgtcttacatggcggcagcaagacagagaatgagagaacaagc

SEQ ID NO: 25583 - DNA, 201 bp, Homo sapiens
cacttgaacccgggaggtggaggttgcagtgagctgagattgtgccattgcactccagcccgggcaacagagcaaaactctgtctcaaaaaaaaaaaaaawatatatatatatatatatgtatatatatatgtgtatatatatatacatatatatacacacacacacacacaatttccataatatatcttatttaactcaa

SEQ ID NO: 25584 - DNA, 201 bp, Homo sapiens
gacgatgctgtcctgtgaaacagaagagagggagaaggcgcagccacacgctcaagtgtcctcaaacctcccctacaccaggagacaaggctaaagccagrgagccacccacactgcaggggcatcagcgggcaggaggacggtgccgggtgggcaaggcctccatctgctcttctgtttgacgggaggcagaaagagttg

SEQ ID NO: 25585 - DNA, 201 bp, Homo sapiens; identical to SEQ ID NO: 18435

SEQ ID NO: 25586 - DNA, 201 bp, Homo sapiens
tctgtaagccagatctgctgtttaacctcagcttccccatctgacaaatgggaccaacactattgcctgactgcttgggtgatccctggagcactttgcaygatgcctggcccaccgcaggccctcagtctgcattgggactgtggggggatccagtgcaagggctcaaagcaccagggcaggcaaagggcagagctggcc

SEQ ID NO: 25587 - DNA, 201 bp, Homo sapiens; identical to SEQ ID NO: 18437

SEQ ID NO: 25588 - DNA, 201 bp, Homo sapiens
caaggacacctacttcgtgacaggcatcgtcagctggggagagggctgtgcccgtaaggggaagtacgggatctacaccaaggtcaccgccttcctcaagyggatcgacaggtccatgaaaaccaggggcttgcccaaggccaagagccatgccccggaggtcataacgtcctctccattaaagtgagatcccactcaagg

SEQ ID NO: 25589 - DNA, 201 bp, Homo sapiens
tccatttctccagctgtccccagagccaacgtgcctctcctttgcagtcacacggaagctctgcagcctggacaacggggactgtgaccagttctgccacraggaacagaactctgtggtgtgctcctgcgcccgcgggtacaccctggctgacaacggcaaggcctgcattcccacaggtaggaggcacgttgggccaca

SEQ ID NO: 25590 - DNA, 201 bp, Homo sapiens
cagtctgcattgggactgtggggggatccagtgcaagggctcaaagcaccagggcaggcaaagggcagagctggcccgaggaactggagctaaggtgcggrgctgggataggagtcaggggacgctcaggctctgagctccttttaccaggaccagtgttcattgaacgtagtttttcttttccttgatgaatgtggacaa

SEQ ID NO: 25591 - DNA, 201 bp, Homo sapiens
ccgcaacagctgcaagctgtccagcagcttcatcatcacccagaacatgttctgtgccggctacgacaccaagcaggaggatgcctgccagggggacagcrggggcccgcacgtcacccgcttcaaggacacctacttcgtgacaggcatcgtcagctggggagagggctgtgcccgtaaggggaagtacgggatctacac

SEQ ID NO: 25592 - DNA, 201 bp, Homo sapiens
gccagggggacagcgggggcccgcacgtcacccgcttcaaggacacctacttcgtgacaggcatcgtcagctggggagagggctgtgcccgtaaggggaastacgggatctacaccaaggtcaccgccttcctcaagtggatcgacaggtccatgaaaaccaggggcttgcccaaggccaagagccatgccccggaggtca

SEQ ID NO: 25593 - DNA, 201 bp, Homo sapiens
gcaagctgtccagcagcttcatcatcacccagaacatgttctgtgccggctacgacaccaagcaggaggatgcctgccagggggacagcgggggcccgcasgtcacccgcttcaaggacacctacttcgtgacaggcatcgtcagctggggagagggctgtgcccgtaaggggaagtacgggatctacaccaaggtcaccg

SEQ ID NO: 25594 - DNA, 201 bp, Homo sapiens
ggtggaggtggtcatcaagcacaaccggttcacaaaggagacctatgacttcgacatcgccgtgctccggctcaagacccccatcaccttccgcatgaacrtggcgcctgcctgcctccccgagcgtgactgggccgagtccacgctgatgacgcagaagacggggattgtgagcggcttcgggcgcacccacgagaaggg

SEQ ID NO: 25595 - DNA, 201 bp, Homo sapiens
ggagcaggaggagggcggtgaggcggtgcacgaggtggaggtggtcatcaagcacaaccggttcacaaaggagacctatgacttcgacatcgccgtgctcyggctcaagacccccatcaccttccgcatgaacgtggcgcctgcctgcctccccgagcgtgactgggccgagtccacgctgatgacgcagaagacggggat

SEQ ID NO: 25596 - DNA, 201 bp, Homo sapiens
agatgcattcatcccatttcgcccggcccgtttgtctctgtccatccgtcaagctttcttgacttcttggtgcattttcaggcaaaccgcagacgccaacrctcccctcgctgcctgggttgctgcctggcgtccattgttcacaggcggtcacctgaggggaggccaacgctcggacagctgcgctcacctgcagatccg

SEQ ID NO: 25597 - DNA, 201 bp, Homo sapiens
tgaggcaggagaatggcttgaacccagaaggtggagcttgcagtgagctgagatcatgccactgcactccagcctgggcgacagagcgagactccatctcaaaaaaaaaaaaaaaaatttaaaaattagcagggtgccgtagtgtgcacctgcagttccacctacttgagaggctgaagtgggaggattactgctgccttg

SEQ ID NO: 25598 - DNA, 201 bp, Homo sapiens
ggaatttacaggcgcgtgccaccacgccagctaattttgtatttttagtagaggcggggtttcaccatgttcgccaggttggtctgggactcctggcctcragtgatctgctcgcctcccaaagtgctgggattataggcgtgagccacactttgccttctttgcaccagggagaattatattttttctcattttttattt

SEQ ID NO: 25599 - DNA, 201 bp, Homo sapiens
cctggcctcaggtgatccgcctgcctcgacctcccaaagtgctgggactacaggcatgagttgccgcgtgcagccctgcagtcctgttttttttttttttkgggcggagtttcactcttgttacccaggctggagtgcaatggcgcgatctcagctcaccgcaacctctgcctcctgggttcaagcagttctcctgccttg

SEQ ID NO: 25600 - DNA, 201 bp, Homo sapiens
ccaaagtgctgggattacaggtatgagccaccgtgcctggactttcaccttttctttctttaaagaaatctggacttgggaacctgtaaactagtgaagtmttaaggtccatttccatctctaccctgtatctgcaaagtgctgtaccacgatctgaacacctggtaatgcatccgtgctgggatggggagcaggccccga

SEQ ID NO: 25601 - DNA, 201 bp, Homo sapiens
aggctggagtgcagtggcgcgatctgggctcactgcaacctcttcttccagggttcacgccattctccggcctcagcctcctgagtagctgggactacatgcgcccgcaaccatgcccggctaatttttttgtatttttagtagagatggggtttcactgtgttagccaggatggtctccaactcctgacctcatgatccg

SEQ ID NO: 25602 - DNA, 201 bp, Homo sapiens
aatggtgggatctcagctcgctgcaacctccacctcccgagttccagcgattctcctgcctcagcctcccgagtagctgagattacgggcgcccgccaccatgcccagctaatttttgtatttttagtagagacggagtttcaccatgttggccaggatggtctcgaactcctgacctcaggtgattcacccgcctcagcc

SEQ ID NO: 25603 - DNA, 201 bp, Homo sapiens
ggagcagaaagcaaattgggactcttcgaagggggcctgatgttgtggggaaactgcgtgcaaatccagctctctgctctgacccctcccaggggaatttrcctgtgtggacactcagccggggcccacctggctgccatgatgctcctggccgactggaccaagcatggggtcacgcccaacctcagaggtttccatggg

SEQ ID NO: 25604 - DNA, 201 bp, Homo sapiens
ggagagtctcactctgttgcccaggctggagggcagtggtgctatgtcatctcactgcaacctccacctcctgggttcaagcagttcttgtgcctcagctkcccgaatagctgggattgcagatgtgcaccaccacgcccggctaatttttgtgtttttagtagagacagggtttcgccatgttggccaggctggtctcaa

SEQ ID NO: 25605 - DNA, 201 bp, Homo sapiens
gctgggattgcaggttcccggttggtatttccttatttggaaagaccatctttgtaggtgttattagctaaagtcaagtcattctgggttagggtgggccmtaaatgccattgactgctatcctgctaagagacagaagagggagggacacacagggaggggaccacgtgaagacggaggcagagacgggaagaggcagag

SEQ ID NO: 25606 - DNA, 201 bp, Homo sapiens
aattgccttgcacagtggctcacacctataatcccacacattgggaggctgaggcaggaggattgagttagaaaccagcctggtcaacatagcaagacccycatctctacaaaagaaaagataaatttgctgggcatagtggtgcacacctatactcctgcttgggaggctgaggcaggaggatcgcttgagcccaggagg

SEQ ID NO: 25607 - DNA, 201 bp, Homo sapiens
aaaaaatttaaaggccaggcgtggcagctcacgcatgtaatcccagcactttgcggggctgaggtgggcagatcacaaggtcaggagattgagaccatccyggctaacacggtgaaaccctgtctctactaaaaatacaaaaaattagctgggcgtggtgcgggcacctgtagtcccatctactctggagactgaggcagg

SEQ ID NO: 25608 - DNA, 201 bp, Homo sapiens
cattgcactccagcctgggcgacagagcgaggccctatcgcttagaaaacaaaaagttacatgaagttcccccaaggtcccgtagctagcatgtgatgtgkcagggagagagcctgtccgcttcactctctcacatgggaccagaaaggggtgatgctgtgcgtggacaggacatctggcaagtggtgtgtccaggacaca

SEQ ID NO: 25609 - DNA, 201 bp, Homo sapiens; identical to SEQ ID NO: 18282

SEQ ID NO: 25610 - DNA, 201 bp, Homo sapiens
tattgaaacttcaagtcatatgaatgaaagaaaattaaaaggaaaggattaaaaaggaaaaaaaaaaaagaggccaggaactgtcacacacgcctgtaatsccagtactgtgggaggtcaaagcacgaggatcctttgaggccaggagtttgagaccagcctgggcaacatagcaataacctgcctctacaaaaaatttaa

SEQ ID NO: 25611 - DNA, 201 bp, Homo sapiens
agatcttggctcactgcaagctccgcctcccaggttcacgccattctcctgcctcagccacccaagtagctggtactacaggcgcccaccaccatgcccasctaattttttgaatagagacggggtttcaccgtgttagccaggatggtagcattagaaattatttctaacccaggctgggctccatggctcatccctgta

SEQ ID NO: 25612 - DNA, 201 bp, Homo sapiens; identical to SEQ ID NO: 18284

SEQ ID NO: 25613 - DNA, 201 bp, Homo sapiens; identical to SEQ ID NO: 18287

SEQ ID NO: 25614 - DNA, 201 bp, Homo sapiens
tattattattattatttttgtttttgagacggagtcttgctctgtcacccaggctggagtgcagtggcaagatcttggctcactgcaagctccgcctcccrggttcacgccattctcctgcctcagccacccaagtagctggtactacaggcgcccaccaccatgcccagctaattttttgaatagagacggggtttcacc

SEQ ID NO: 25615 - DNA, 201 bp, Homo sapiens; identical to SEQ ID NO: 18288

SEQ ID NO: 25616 - DNA, 201 bp, Homo sapiens
gacatttacttccccgacgagtcgtctgaaggttgtcggtgaaggggctgggggtcccggggcttgggggtccagtggcagagctcagcagggcgggcctygctcacacgccctgtgcttggttttgcagccttgcctttcttcctgttctttcacggaggatactggcagagcggaaggtgagtcgggggatgtggatgg

SEQ ID NO: 25617 - DNA, 201 bp, Homo sapiens
tacgataaagtttaatttataaattggcaaagggtatataaatattccttctaagagattaacaataactaataaagtagaacgattaaaacaatatactrtgatcaaagttatgtgaagccaggtgctgtggctcatgcctgtaatcccagcactttgggaggctgagacaggtggatcacctgaggtcaggagttggag

SEQ ID NO: 25618 - DNA, 201 bp, Homo sapiens
ataaatattccttctaagagattaacaataactaataaagtagaacgattaaaacaatatactgtgatcaaagttatgtgaagccaggtgctgtggctcaygcctgtaatcccagcactttgggaggctgagacaggtggatcacctgaggtcaggagttggagaccagcctggccaacatgacaaaaccccgtctctact

SEQ ID NO: 25619 - DNA, 201 bp, Homo sapiens; identical to SEQ ID NO: 18302

SEQ ID NO: 25620 - DNA, 201 bp, Homo sapiens
agccccaccccaggcagcttgaaatcagagctggggtccaaagggaccacaccccgagggactgtgtgggggtcggggcacacaggccactgcttcccccygtctttctcagccattcctgaagtcagcctcactctgcttctcagggatttcaaatgtgcagagactctggcacttttgtagaagccccttctggtccta

SEQ ID NO: 25621 - DNA, 201 bp, Homo sapiens
tatgcgtctagacatgcggatatattcaagctgggcacagcacagcagccccaccccaggcagcttgaaatcagagctggggtccaaagggaccacacccygagggactgtgtgggggtcggggcacacaggccactgcttccccccgtctttctcagccattcctgaagtcagcctcactctgcttctcagggatttcaa

SEQ ID NO: 25622 - DNA, 201 bp, Homo sapiens
tgaccttgtggtccacccgcctcggcctcccaaagtgctgggattgcaggtgtgcgccgccgcgcccggccaggcttttttttctctaggcctgctgtggycaccaaggctggggaccagggggcctccagggacagggatcccaagttgcacgttaatacacggagccctttctgagatgcaggttctacagggaactgg

SEQ ID NO: 25623 - DNA, 201 bp, Homo sapiens
tggcccccttcccagagacaggggaggatcctccacccactccccagcctccaggaccatcctgactcctgccttcaggcactcaagttatgcgtctagayatgcggatatattcaagctgggcacagcacagcagccccaccccaggcagcttgaaatcagagctggggtccaaagggaccacaccccgagggactgtgt

SEQ ID NO: 25624 - DNA, 201 bp, Homo sapiens
agcaaagaatagccccctcctttcctggtgcaccttcagatgtgccgatggggcccaggctcgctgcagatggcccccttcccagagacaggggaggatcstccacccactccccagcctccaggaccatcctgactcctgccttcaggcactcaagttatgcgtctagacatgcggatatattcaagctgggcacagcac

SEQ ID NO: 25625 - DNA, 201 bp, Homo sapiens
tggggtttcaccatattggccagggtggtctcgaatgcctgaccttgtggtccacccgcctcggcctcccaaagtgctgggattgcaggtgtgcgccgccscgcccggccaggcttttttttctctaggcctgctgtggccaccaaggctggggaccagggggcctccagggacagggatcccaagttgcacgttaataca

SEQ ID NO: 25626 - DNA, 201 bp, Homo sapiens
atttttagtagaaatggggtttcatcatgttggtcaggctgatcttgaactcctgacctcgtgatcccgcctccgcctcccaaagtgctgggattacaggygtgagccaccgcgcccagcctctgtttttttttttctttttttaattctccaaactgcctcagaatggttccttgttactttctgcataaagtgtgaagg

SEQ ID NO: 25627 - DNA, 201 bp, Homo sapiens
gctggagtgcaatggcgcgatctcagctcaccgcaacctctgcctcctgggttcaagcagttctcctgccttggcctcccaagtagctgggattacaggcrtgcgccaccacgtccagctaattttgtatttttagtagagatggggtttctccatgttggtcaggctggtctggaactcccgacctcaggtcatctgccc

SEQ ID NO: 25628 - DNA, 201 bp, Homo sapiens
cagggtggtctcgaatgcctgaccttgtggtccacccgcctcggcctcccaaagtgctgggattgcaggtgtgcgccgccgcgcccggccaggcttttttytctctaggcctgctgtggccaccaaggctggggaccagggggcctccagggacagggatcccaagttgcacgttaatacacggagccctttctgagatgc

SEQ ID NO: 25629 - DNA, 201 bp, Homo sapiens
gggggtgggttctccctgatgaccaggttctgtctctatggaagtcactgcggtgataggtctgtgatggtccctaagtgccagtccatctctgtggagayccctcggtggcctccctatctctgtgggcgatgcctgagggttagggatgtctccaccctgatggggtgtcccagagacattttcccatggcagtcctcc

SEQ ID NO: 25630 - DNA, 201 bp, Homo sapiens
ctccacagcacccaccccccagcctggcaccgggggaacgccgctggtgagatggcttcaccccagcccctcccacctcctgagggaggcttctctcctcctcactcacttccttatctccctgctcactcagcttctgtgtggccgtctgtgacagtcacctgtcttgaatctgggcccccgcacctcccacatctcccc

SEQ ID NO: 25631 - DNA, 201 bp, Homo sapiens
ggaagcaggaaccggccggggcctctcgacggggctgctgatgggaatggggggcatttacaaggacggtcccgaggtttcttcgtgggcctcatgaaggrtcttgaagagtaaggggcagtgaagctgtgatgttactgcaggaagggagtagggtggtatccagacgcgaaagggttaatgggagttgtcctcatgact

SEQ ID NO: 25632 - DNA, 201 bp, Homo sapiens
ccacagcacccaccccccagcctggcaccgggggaacgccgctggtgagatggcttcaccccagcccctcccacctcctgagggaggcttctctcctcctcactcacttccttatctccctgctcactcagcttctgtgtggccgtctgtgacagtcacctgtcttgaatctgggcccccgcacctcccacatctccccag

SEQ ID NO: 25633 - DNA, 201 bp, Homo sapiens
tccacagcacccaccccccagcctggcaccgggggaacgccgctggtgagatggcttcaccccagcccctcccacctcctgagggaggcttctctcctcctcactcacttccttatctccctgctcactcagcttctgtgtggccgtctgtgacagtcacctgtcttgaatctgggcccccgcacctcccacatctcccca

SEQ ID NO: 25634 - DNA, 201 bp, Homo sapiens
ctcttctccatggaaggctttgggaccgatgctgtcatctatctcaaggtgagggcccttcccgcagagcccagctggagaagagctttgctgataggacstgggcagccttggccagctgcgagctttcctttccatccccccagtccttccctggccccagactctgagaatccaagcaaagctacagttcctcaacct

SEQ ID NO: 25635 - DNA, 201 bp, Homo sapiens
ggtctacgtcccctcccacctctaccacatgctctttgagctcttcaaggtgaggaggctgggagccggtgctttgcggggagcgtgagtagggctggcttctcccatgcatctcttacctctgcccctccgcagaatgccatgagggcgactgtggaaagccatgagtccagcctcattctcccacccatcaaggtcatg

SEQ ID NO: 25636 - DNA, 201 bp, Homo sapiens
taagccacagcccctgggcaggaatgagggagccagcatgcattggtgccatctgtcgctctgtctgggcagatgggaggagctggaggggtttccaagcrggagcccccaggcctcatcggtaactctgaccagtgtcctggaagcgggactagctgctgaccagcgccacacatgaacacttcctccaaggacatttcc

SEQ ID NO: 25637 - DNA, 201 bp, Homo sapiens
aaacctccttcaccttcctcaggcaggagctgcctgtgcgcctggccaacatcatgaaagagatcaacctgcttcccgaccgagtgctgagcacaccctcygtgcagctggtgcagagctggtgagacccctggctcagtccctgcacctcccactccatcgccagtgtccctgggctcagggatggcatctccaagcttt

SEQ ID NO: 25638 - DNA, 201 bp, Homo sapiens
cagaggggggataagggctgagtcccaggtacagggtgctggccgtaagccacagcccctgggcaggaatgagggagccagcatgcattggtgccatctgycgctctgtctgggcagatgggaggagctggaggggtttccaagcgggagcccccaggcctcatcggtaactctgaccagtgtcctggaagcgggactagc

SEQ ID NO: 25639 - DNA, 201 bp, Homo sapiens
agtttgatgggagagacatggactccattctcactgttccctgagcccggtgggcaagacccaggccctgccatggggaggatgagaactctgggctttcragtgggaagcctgccggcaggcagctaaaagatcagagtgggctttgggaggagcagggagggcactgggagtccatcggattgggaagggtagagcggg

SEQ ID NO: 25640 - DNA, 201 bp, Homo sapiens
aactggagcagacagaaattctggtcactggcacatcataaggatttattgaaataaattgagaactgcctccccttcacatgcaggtgggcacccactakagctactgatggctttaaggatgtgggtgccttccaacctcccatggccctgccaccaggcccagatggtgccagtgtcctcatatctgtttccctccga

SEQ ID NO: 25641 - DNA, 201 bp, Homo sapiens
gcgttggaatgcccgccagggcaagggtagggaggaggcggccgaaccgcgtcgctgggccgaaaggtgcgcgagcgctgcccgcgcggggaccacaaccmaagtcgcggccgccgcagccatgcgctgggtgtgggcgctgctgaagaatgcgtccctggcaggggcgcccaagtacatagagcacttcagcaagttctc

SEQ ID NO: 25642 - DNA, 201 bp, Homo sapiens
cagcttcctcatgtgtaaaagggggacccattgtgtttgtaagggccaaaggccagtgctagatgtgaaaagtgtgcagaactctaccaatacaaggcatrtccccaggctgccgggcagcaacacctccagcccacagaggatgtaattgtggtgtggcttcttgggcaaggtagtaataaatcatgataataacaaaag

SEQ ID NO: 25643 - DNA, 201 bp, Homo sapiens
agagaagccccagggacccctccaagcttacctggccagagggtgactcgttcctcagtaaggggtgccatggatttaatgctggtggtccccagtatcartgtcaggaggactgcctgctgggtgggccacccatgccctgaatgaccccatcttctctcagatgcctacgacatggctaagctcctgtgtgacaagtat

SEQ ID NO: 25644 - DNA, 201 bp, Homo sapiens
cccatcccaaacacatcggcagcatcgaccccaactgcaacgtctctgaggtggtcaaaggtgagccattcccacggtgcctggcccgcagagaagccccrgggacccctccaagcttacctggccagagggtgactcgttcctcagtaaggggtgccatggatttaatgctggtggtccccagtatcagtgtcaggagga

SEQ ID NO: 25645 - DNA, 201 bp, Homo sapiens
cgttttgttttcagtgtttgcaaaatgtaaaattatgtcacatctttaaaagaatgtttaatttagtatttataaaaactctcattatgttcaaaaacaayttgttgtttagagtttcttattccaggaggattcactatgattttttgagaagttgtagccagtcataaattaaacaagttcctcatgctcaaataattt

SEQ ID NO: 25646 - DNA, 201 bp, Homo sapiens
gtaaaagggggacccattgtgtttgtaagggccaaaggccagtgctagatgtgaaaagtgtgcagaactctaccaatacaaggcatatccccaggctgccsggcagcaacacctccagcccacagaggatgtaattgtggtgtggcttcttgggcaaggtagtaataaatcatgataataacaaaagcaaacacctccaaa

SEQ ID NO: 25647 - DNA, 201 bp, Homo sapiens
acagtgaaggccagagcactgtggacatgggaatgagtcctcgtgtggaggggccttttctagaaatactgttgggcccctggggcccttggcactgcagrgctctaggtagcgcccccccttcctcctggttataagtgtttctgccagagagaggctcttcctgccttccccaaaggaacaagccacagactggacatg

SEQ ID NO: 25648 - DNA, 201 bp, Homo sapiens
ggggtactgggtccccctcagcaccctccacagcacaggccttccaagtggatgtcccgttgccttattcccccagcccacaaaggcaccctggccttggyctgctgaagtgttaggaagagggtgggtgccctccagacctggggactgagtggggaaaggagttacacccgtgagtggggaatgaggctggtcctgcag

SEQ ID NO: 25649 - DNA, 201 bp, Homo sapiens
gtgcccagcacggagcccaagaacacgtccacgtaccgcgtcagctaagggccgccgtgcatctgcacctgagaggacggactgccgcctctgggtccccycaccgtggtgcccctcaccatcctcctgggggagcagggggtgggttctccctgatgaccaggttctgtctctatggaagtcactgcggtgataggtctg

SEQ ID NO: 25650 - DNA, 201 bp, Homo sapiens
aaaatgagctgtaaagaatccctgacacatcccatctctcccagatgagtgaccgaggtgggggtgttcccttgaggaagattgagcgactcttcagctayatgtactccacagcacccaccccccagcctggcaccgggggaacgccgctggtgagatggcttcaccccagcccctcccacctcctgagggaggcttctc

SEQ ID NO: 25651 - DNA, 201 bp, Homo sapiens
cctggcgccactaccagaccatccaggaggccggcgactggtgtgtgcccagcacggagcccaagaacacgtccacgtaccgcgtcagctaagggccgccrtgcatctgcacctgagaggacggactgccgcctctgggtccccccaccgtggtgcccctcaccatcctcctgggggagcagggggtgggttctccctgat

SEQ ID NO: 25652 - DNA, 201 bp, Homo sapiens
ggcagaagtacagcaggatggaagaaaagacccctgccttcagaaacatccagtctgagtggggagacagactctgcttcagggagccccaagtttgatgrgagagacatggactccattctcactgttccctgagcccggtgggcaagacccaggccctgccatggggaggatgagaactctgggctttcgagtgggaag

SEQ ID NO: 25653 - DNA, 201 bp, Homo sapiens
atccagcaatgcctgtgagaaaacctccttcaccttcctcaggcaggagctgcctgtgcgcctggccaacatcatgaaagagatcaacctgcttcccgacmgagtgctgagcacaccctccgtgcagctggtgcagagctggtgagacccctggctcagtccctgcacctcccactccatcgccagtgtccctgggctcag

SEQ ID NO: 25654 - DNA, 201 bp, Homo sapiens
ctttcctttccatccccccagtccttccctggccccagactctgagaatccaagcaaagctacagttcctcaacctgaagaaccctcaacccccagacacrcactgcttgtcagggaatttaggggagtctgtggtctatgattaagacccctgtgctgggaacccttgacttgttagacccagaaggaaggggacaccct

SEQ ID NO: 25655 - DNA, 201 bp, Homo sapiens
aaatatttgggctgggcacagtggctcacacctgtaatctcagcactttgggaagctaaggcaggccaatcacttgaggtcaggagtttgagaccggcctsggcaacatggtgaaaccctgtctctactaaaaatacaaaaattagccgggcatgatggcacatgcttataatcccagctacttggaaggctgagacagga

SEQ ID NO: 25656 - DNA, 201 bp, Homo sapiens
gctggagtgcaatagagcgatctcggctcactgcaaccattgcctcccaggttcaagcgattctcctacctcagcctcccgagtagctgggattacaggcrtgcaccaccatgcccagctaatttttgcatgtttagtagagacaggtttttgccatgttggccaggctggtcttgaactcctgacctcaggtgattcgcc

SEQ ID NO: 25657 - DNA, 201 bp, Homo sapiens
acatgcacacaattacacacactcccccgctggctcagcaccccctctgctcccacacagggctgcagggccctcctcccactcactcaccctctcctccygcccccaccgcccattatcagccccacactctcagcaagcctcctggcttctgcctgcatccacccctcctccttctcattcctggggctctggactggc

SEQ ID NO: 25658 - DNA, 201 bp, Homo sapiens
gctctccaaacccgtcagccgctccttgcatgaccgagcaggaccgaccacttactgcgcatgtactcgaggcatcatcttttctgtacacccaggcccaygaggtgcttactcccatgaaccccattttgcaaatggggacccgagggactcggtggcctctttagggcacaatcagcagcggaacccaaacctgcctgg

SEQ ID NO: 25659 - DNA, 201 bp, Homo sapiens
aggagctggaccctagctgccccagtgggcaaggacacttgaagatcaaatctgttccggcctggcagcctctccccagctgggcaggggccccaggcacygtgatgtggagtcaagccgcctatacctcccttggctgccccagggctgctaggtcaggatcgcccactaccagcaacctgggggtggccctggggcagg

SEQ ID NO: 25660 - DNA, 201 bp, Homo sapiens
tcagaaacatccagtctgagtggggagacagactctgcttcagggagccccaagtttgatgggagagacatggactccattctcactgttccctgagcccsgtgggcaagacccaggccctgccatggggaggatgagaactctgggctttcgagtgggaagcctgccggcaggcagctaaaagatcagagtgggctttgg

SEQ ID NO: 25661 - DNA, 201 bp, Homo sapiens
agcgatctcggctcactgcaaccattgcctcccaggttcaagcgattctcctacctcagcctcccgagtagctgggattacaggcatgcaccaccatgccsagctaatttttgcatgtttagtagagacaggtttttgccatgttggccaggctggtcttgaactcctgacctcaggtgattcgcccacctcagcctccca

SEQ ID NO: 25662 - DNA, 201 bp, Homo sapiens
actgtgtgaacagaagcgtggaggtgagagtcgagcagaatcagcactctggagtggcaagagcgctggagactcgggggcttcatcatcccacttactarctatggggctgcttacgcctccctgggggaggctgtgcgtggggctgattcctgcctgtctgcctgttacaggttacagtgaaggccagagcactgtgga

SEQ ID NO: 25663 - DNA, 201 bp, Homo sapiens
tgccagcctgattgtctgctggggtggcagggatggtgatgggggctgagagaaaggctgatcttttctgctgttggggcccccagccccatcagcagccrcagctcctcctatcgggctctgtgcagagctctgggtagggaggggtgggcggtgagctctgggcctgagacagcccccttcgtgtggcagtggggcagg

SEQ ID NO: 25664 - DNA, 201 bp, Homo sapiens
ggctgggcttgggagctccggatctcaccaagggactcctgggggccttgattactgcagaggtcagcaggcccagagaccccagcctccctgcaggtccyggggaggggtgggggcaatgcctctcccgcctgttggtgcctgtctgtcactgcaccactgcttcaggcctcccttatataagcccagttctctctctgg

SEQ ID NO: 25665 - DNA, 201 bp, Homo sapiens
cagcctgggcgacagagcgagactccgtctcaaaaatgaaagaaagaaagattcagcttagaggagagcaggccgagggattgctaaagcatcccaacgcrctgaagagacagcctgccaagaatgtttccagagagaatgagcattggctacagcaagagagactgaggtgtgaagacaagaaggacttcccgacagggt

SEQ ID NO: 25666 - DNA, 201 bp, Homo sapiens
cctaggcaagctgagagctaaaaggaagggaagggcattccaggctaaaggaatagcctgggcaaaggtgtggagacaggaaggggcctggctaagggagytgagaactgactttctggagattgtgctgttagtgtgggctgtgaggaaggggtggaggcatgaggcacagagcctgatcttcatggagcccaaccaggt

SEQ ID NO: 25667 - DNA, 201 bp, Homo sapiens
acctaggcaagctgagagctaaaaggaagggaagggcattccaggctaaaggaatagcctgggcaaaggtgtggagacaggaaggggcctggctaagggarctgagaactgactttctggagattgtgctgttagtgtgggctgtgaggaaggggtggaggcatgaggcacagagcctgatcttcatggagcccaaccagg

SEQ ID NO: 25668 - DNA, 201 bp, Homo sapiens
cttgctcagggtcacacagcccagcctcctccccctccctctccctcccttagagggagctgcttgcttgaatgggcaggagcgggacacaggagggaccrcccttttgtggtctttccaggcccccgtgtctggcagctgggctgccgctgagctggggtggggtggtctgctgaggagtggacaaggcacagggaggtg

SEQ ID NO: 25669 - DNA, 201 bp, Homo sapiens
gcatggcctgggtgacagagttggaagcagagcctgatggactggaacccagggcccctgaccctgggccaaggccatattcggtcccccaccctttccakcttgacaccagacaaggaccgaggcatttggactcctgttctcaggcccgtttgccccatggatgggcattaagacacagcagccccacatgggcattca

SEQ ID NO: 25670 - DNA, 201 bp, Homo sapiens
atgaccaggttctgtctctatggaagtcactgcggtgataggtctgtgatggtccctaagtgccagtccatctctgtggagacccctcggtggcctccctrtctctgtgggcgatgcctgagggttagggatgtctccaccctgatggggtgtcccagagacattttcccatggcagtcctcctctctgagaccagggctg

SEQ ID NO: 25671 - DNA, 201 bp, Homo sapiens
catggactccattctcactgttccctgagcccggtgggcaagacccaggccctgccatggggaggatgagaactctgggctttcgagtgggaagcctgccrgcaggcagctaaaagatcagagtgggctttgggaggagcagggagggcactgggagtccatcggattgggaagggtagagcgggtgaagacaccgtggag

SEQ ID NO: 25672 - DNA, 201 bp, Homo sapiens
agtacttcctggaccgcttctacctcagccgcatctccatccgcatgctcatcaaccagcacagtgggtgccggccacagcggcggggagcgggcggtggdgggggcggtgctggggcccagggccgggctgctgaggggacctagaccactcttcagaaccccacaaagggagtctttgaatagttactccagtaactat

SEQ ID NO: 25673 - DNA, 201 bp, Homo sapiens
atacctcccttggctgccccagggctgctaggtcaggatcgcccactaccagcaacctgggggtggccctggggcaggagggaggctgtgccaacgtggcrgctgaaatgggcattgtgtgggccctgtctgtctatgtggtatttccatggtgccagctggggactgggggtggggggcagtctctcaagagttgagttg

SEQ ID NO: 25674 - DNA, 201 bp, Homo sapiens
gtaccgcgtcagctaagggccgccgtgcatctgcacctgagaggacggactgccgcctctgggtccccccaccgtggtgcccctcaccatcctcctggggsagcagggggtgggttctccctgatgaccaggttctgtctctatggaagtcactgcggtgataggtctgtgatggtccctaagtgccagtccatctctgtg

SEQ ID NO: 25675 - DNA, 201 bp, Homo sapiens; identical to SEQ ID NO: 19305

SEQ ID NO: 25676 - DNA, 201 bp, Homo sapiens
gctttgggaagcttggggctgggggagaggctgtcaggggaacctagaacctagcttatgcccccttcccagatgtgacactcagtgctctgaacgactcygatgccaacagtgacgtggtggatattgaagggctaggagaaactcctccagctaagaaactcaacttcgaccagggtaggagtcctcctcctcccacac

SEQ ID NO: 25677 - DNA, 201 bp, Homo sapiens
tcacccaagaaagggcccaagaaggtggcatctggtgtcttgtcacctcctccagctgcccctcctcccagcagctccagtgtccctgaggccgggggtcyccccataaagaaacagaaggctggtgagggctgtggagttgctgcctaggggttaaaggtcccatctgaggtttagtgagagaattgggcctgggtcaaa

SEQ ID NO: 25678 - DNA, 201 bp, Homo sapiens; identical to SEQ ID NO: 19328

SEQ ID NO: 25679 - DNA, 201 bp, Homo sapiens; identical to SEQ ID NO: 19308

SEQ ID NO: 25680 - DNA, 201 bp, Homo sapiens; identical to SEQ ID NO: 19315

SEQ ID NO: 25681 - DNA, 201 bp, Homo sapiens
atgtggttaggagccagggagtcagacctcagcggccatcccaaacccaccaccttaggtgtgacctctttaggtattttacttttctgtgcttctcagtmcacctctgcaaaatggctatgacagatctcaccccataggatggtcaagaagattgaataaagtaatacacgtaacagcgcctaaacaggtgtcgggcac

SEQ ID NO: 25682 - DNA, 201 bp, Homo sapiens
aaaaagaaaaaagggaactggagcggagggccctggagtgggaggagccagggctggtaaaggtggagacccctcaaggtaggagaaacaagagcggggtkcctgagaggtgcttgagttgaatggaggacatgggaggaaaagagagtgcttgttccagaaatgtgtagctgggccttgttttcccagtaatccacccac

SEQ ID NO: 25683 - DNA, 201 bp, Homo sapiens
tcaatccacctgtaaatcaccaagctctacctgatgtctctcccagaagagaattaggagatgggcctttcccactactcagttcagggactccactctcyacactccatccatcctgagtgagtgtaaaacttcgagaaagtgagaaccctaccaatgggttggggccccgacctggattcttatgaagggactcccaga

SEQ ID NO: 25684 - DNA, 201 bp, Homo sapiens; identical to SEQ ID NO: 19310

SEQ ID NO: 25685 - DNA, 201 bp, Homo sapiens; identical to SEQ ID NO: 19296

SEQ ID NO: 25686 - DNA, 201 bp, Homo sapiens
ccccataggatggtcaagaagattgaataaagtaatacacgtaacagcgcctaaacaggtgtcgggcacatagtgctcagaaaatgttggctcctattaawgtttgacccctttgcttcattcccacccccaggaatggcccccagaacatatacaacctttacgagcaagtcagctacaactgtttcatcgctgcaggcc

SEQ ID NO: 25687 - DNA, 201 bp, Homo sapiens
agtcctccaacagctcagaggagagaactggcagaggaggtagtggttacgtaaatcaactcagtgcggggtatgaaagtgtagactctcccacgggcagkgaaaactctctcacacaccaatcaaatgacacagactccagtcatgaccctcaagaggagaaagcagtgagtgggaaaggtaatcgaactgtgggttccc

SEQ ID NO: 25688 - DNA, 201 bp, Homo sapiens
aagacagagagttttgtcttcattttgtgatggatggctctttcctttgcagccaaacagggaaaaagttaatggcgaagtgtcgaatgcttatccaggaraatcaagagcttggaaggcagctgtcccagggacgtattgcacaacttgaagcagagttggctttacagaagaaatacagtgaggagcttaaaagcagtc

SEQ ID NO: 25689 - DNA, 201 bp, Homo sapiens
gctgcgcggtggcccggggggcccgggcggcagggcaagcagcgcggcctcggcctatgcgaccggtggcgccggcgcggcttctgcctggagaggtaggygcgggccggctggcgggagcggacgcgggggacctccggggcctgagggctgatgcgcagccgcccccggcgggtaaggggcgggcagggcccgaaaggc

SEQ ID NO: 25690 - DNA, 201 bp, Homo sapiens
tttgggaggccaaggcagttggattgcttgcgcccaggagttcgagaccagcctgggcagcatggcgaaaccctgtctctaccaaaaaaaattacaaaaaattaactgggtgtggtggcacatgcctgtagtcccaggtactcgggaggctgaggtgggaggatcacttgagcctgggaggtcaagattgcagtgagccat

SEQ ID NO: 25691 - DNA, 201 bp, Homo sapiens
taaatggatttttttctataaaattggctgtaagccagagtatatcaggtactataaatacatcactaatttgaaacaaataatggctcaggcaatcccctgtctggaatatttccagtggtggaatgggttttgctttgggttgcgtgcacgcgcacgcacgtgtgtgtcttcgctttactgtttttctgttctaatttt

SEQ ID NO: 25692 - DNA, 201 bp, Homo sapiens
ggaacacttccgccgcttcgaggccattttatctccgtcctccgtccccaaggcccgggttgagaggggtgctctggcggccggagagaccggccactcasggaggccggaggatgccctccccgggctgagcggcggcgctcgttttttcctcgcctcggggtcgcccccttcacctcccttgggcctctcctgaggacc

SEQ ID NO: 25693 - DNA, 201 bp, Homo sapiens
aaggtctcttatggtcttgtatgtagtattgaatccccttgaatatattgtttagcagttttgatcattatgtatttgcttcttgctcctcaaaattgtaygttagttagtaggtccttcagcaaaagaagactgaagatagtattttggttttattcttgtttttaatttttttagttgtctccaacttttctgcctcta

SEQ ID NO: 25694 - DNA, 201 bp, Homo sapiens
ctgtggtaggtactaccttactttaacaacataatgctataaaaggaaagacttaaactggtattacccttttatagtcccttagcaacatgcgtaggatrctacttgaggtcattatatttctcttcaccctttatggcgacatcaaatgatttgaatggctgatcagcttttttacgagggaatttgtaaaaactaccc

SEQ ID NO: 25695 - DNA, 201 bp, Homo sapiens
attatatttctcttcaccctttatggcgacatcaaatgatttgaatggctgatcagcttttttacgagggaatttgtaaaaactacccaataactctaatratggaagatgttaacaaaggaagatctgggtacagagtatataggaactctgtaatatctttgccacttttttgtaaatctaaaactattttaaaattgt

SEQ ID NO: 25696 - DNA, 201 bp, Homo sapiens
agattgtataaggatattagctgtgatgagactcactgcattattttttttagtgaattttatgaaatccccgttccattcaacaggcacatgtttaaaaragctttgtcgttggtgttaatgggggaatgtgttccttcattgtatttgggccttttgtattgcactcttgatattaaattaaatgtgccttgaaatagt

SEQ ID NO: 25697 - DNA, 201 bp, Homo sapiens
ttctgtttgaagaaaatagagggagaaacagaagtcttaagtctgtggcacactgtgtcttcagacagtttgaaggaatgaaaacctagagattttaaatyatgaattgaacatgtaaaattccagtaaaatgtaaaaacggaatatgcatcgctcttaaccttgagcatagtgacttagagacactgtgtatcagttttg

SEQ ID NO: 25698 - DNA, 201 bp, Homo sapiens
ataagctggaatttatattgaacagcatccatgatactttagtattacaactaaagttgtacatactgagtaggtaggatgccttagtaactagataaaasgtataccacctagccatagtgataaatatagctgttttcaaactgtcattcacagatctctaccacagtacctgttacatgaagttcctggttggttctc

SEQ ID NO: 25699 - DNA, 201 bp, Homo sapiens
tacatatagaagtcttcttatgtgttattaaagtcttctaagatagtattctggtcattggagacaccaaaaatctatgggcacagtcctgttcctgtttyttttgccaatagaatgttccttaaggttcagtcacagtccttttacttcccttacagagattgtttaaatttccacaaaagcacgtatttactcttcttt

SEQ ID NO: 25700 - DNA, 201 bp, Homo sapiens
tgcttgcatgttttcatttctttgagatacatgtttaagagtgcaactgctgagttatatggcacattcatttttagttgtattaataaaaggaactgccwtacttcttcagataccatttttatattctcacctgcagtgtaggaaacttcagtttctctgaatcctcaccagcgtttggtgttgccactaatttttatt

SEQ ID NO: 25701 - DNA, 201 bp, Homo sapiens
agctttttgttttgaaataattatagattcataggaagttgcaaataaatgtacagagaggttctgtgcaactttcactgagcctgcttcattgttaacaycttgcgtgactagcagacatctctaataactgtgaaaatcagggaattgacattggtacaatccacagagcttattcacatttcacgttatactagcact

SEQ ID NO: 25702 - DNA, 201 bp, Homo sapiens
tactagatttttgctcagtgaaacaaatatattcccaaaccacttagtatatttgttccttttactaaatttatattagaaaattttaactgtaatcctayttaagccttagtatggagttagatcttgggccagatctactttgagtatgaagaaaatgatgaatttaatgctaataactatatttcatattttagaaat

SEQ ID NO: 25703 - DNA, 201 bp, Homo sapiens
ataaatggatttttttctataaaattggctgtaagccagagtatatcaggtactataaatacatcactaatttgaaacaaataatggctcaggcaatcccctgtctggaatatttccagtggtggaatgggttttgctttgggttgcgtgcacgcgcacgcacgtgtgtgtcttcgctttactgtttttctgttctaattt

SEQ ID NO: 25704 - DNA, 201 bp, Homo sapiens
taatgggggaatgtgttccttcattgtatttgggccttttgtattgcactcttgatattaaattaaatgtgccttgaaatagttggtttttttttttttttaagttcaaagaatattatgatgattttgttgtactctttaacattttaatttggggcggggagggcctgttgagagcagattcattttggaaatactgtt

SEQ ID NO: 25705 - DNA, 201 bp, Homo sapiens
tcacaatttgcctttttgtgggtgtacgttttggtttttttttgttgttttttttctttgttttttttttcttttctttttttttttttttttttttttttgcttcaatacttctgccgctttggaaattgtaacagttaattactttgaatgttgctaaaaggacattttgtgtagggtcaagttatttttatatgagtt

SEQ ID NO: 25706 - DNA, 201 bp, Homo sapiens
ttaaccatttagtttggggctctatattacttgcttgagccttaatcaatgtggttttattcaatggtttgttctttgaatggttgcaaaaactgtagatmatcttactgaggactgtacaaacatgaaggtgtggtatcaaacttcaggttgaaactgtttgaagcattataaacattcatttcacaactagattgtata

SEQ ID NO: 25707 - DNA, 201 bp, Homo sapiens
atgtttggattgtaaagtaaaatgtatgtagccactttaagtcccagatttggagatgtaatcaaatggcctcaattcctaagtgagtaaccttaaataawgttatttttttaattgacaaataagttttttacatattcaaggactactacatagtgatgtttcaatacatataatgtatagtgatcagatcggggtaat

SEQ ID NO: 25708 - DNA, 201 bp, Homo sapiens
aatgtttggattgtaaagtaaaatgtatgtagccactttaagtcccagatttggagatgtaatcaaatggcctcaattcctaagtgagtaaccttaaataaagttatttttttaattgacaaataagttttttacatattcaaggactactacatagtgatgtttcaatacatataatgtatagtgatcagatcggggtaa

SEQ ID NO: 25709 - DNA, 201 bp, Homo sapiens
atacatagatacagatactgatataccggttaaatatgtacagctcaaatagctaaaattgtctttaagattttttaaattaaaaatattattggccgggygcagtagcttacacctgtaatcccaacactttgggaggccaaagcaggtggattacctgaggtgaggagttcgagaccagcctggtcaacatggtgaaac

SEQ ID NO: 25710 - DNA, 201 bp, Homo sapiens
attttcgtttgttttttggtaatgtttggattgtaaagtaaaatgtatgtagccactttaagtcccagatttggagatgtaatcaaatggcctcaattccwaagtgagtaaccttaaataaagttatttttttaattgacaaataagttttttacatattcaaggactactacatagtgatgtttcaatacatataatgta

SEQ ID NO: 25711 - DNA, 201 bp, Homo sapiens
ggttaattgcaaagatgatcagtagccaagtaatttcttctgaactacctaccttttcaaaatcttcaggaattatttcctgtgacttttgtccttttatrtgtaacagtccttggttgagaacatgggcctctttggagtgttatagaggaccacactatccttaaggatcagacttgctatggaactaaggcactggat

SEQ ID NO: 25712 - DNA, 201 bp, Homo sapiens
ctaatgatgtaactggcctaagagagtctgaagaaaaactaaagcaacaacagcaggagtctgcacgcagggaaaacatccttgtaatgcgactagcaacyaaggaacaagagatgcaagagtgtactgtaagtatttcaagttatataaatgtctttagttgaggaattggtttttagtccacattattacatgttaatt

SEQ ID NO: 25713 - DNA, 201 bp, Homo sapiens
gtagggtcaagttatttttatatgagttaatgtgaaattgtaaatggaaatttttccttaaaatacaacacaatgatgtctgtataaatctgtctgtttaraatctgtgctgtgtaagggcattcgtactcatgctgttactgtacttatgcaccattcagacttgttagagtagatgtgggtttatgactgccaagtttg

SEQ ID NO: 25714 - DNA, 201 bp, Homo sapiens
tttactgtattgtttgggggataatgacaagaaaaaaaatctgtacatgttcagtatagacccagttttttcttccttgaatattttccttctacagttgsttgaattcattgttgcatgtggagggccaactgtatattattttaagtatctgacttcccccaaaacaaactcagtcatattttaagattccaagcaaaa

SEQ ID NO: 25715 - DNA, 201 bp, Homo sapiens
gaagatggtaattatggggaagcatctgctgtgatatagttatgtttgtatgtgttacatctatcactgtaataattgtaagcaaagacagagagttttgkcttcattttgtgatggatggctctttcctttgcagccaaacagggaaaaagttaatggcgaagtgtcgaatgcttatccaggagaatcaagagcttggaa

SEQ ID NO: 25716 - DNA, 201 bp, Homo sapiens
gataatttgagatgaaaatagatggatttcagaattgattattgatgtaatagaaacaaggtgtagctgtttgggcactttttgtttagggtttatttttrctgctgtgttggcaaaatactgaaatgcagaagatggatgtgtcccagaaaagaagatggtaattatggggaagcatctgctgtgatatagttatgtttg

SEQ ID NO: 25717 - DNA, 201 bp, Homo sapiens
ggccttcggtgatacctcatcactcttgtctcctcgacctggattttaaggttatttcaactataatggaacctaaccttttccagcttttttttttttttaaaacagctgtcacctgcatacgccagctgaacaacttcctgttcttccaattataatacaagtgaggttttgcagacagggcagggcagcaggagcaaa

SEQ ID NO: 25718 - DNA, 201 bp, Homo sapiens
tccaggctggagtgcagtggtgtaatcacacctcacttcagcttcccgagtaactgatttcaggtgtgcgccaccaagcgcagctaatttcttaatttttstagagatgaggtcttccctatgttgcccaggctggtcttgaactgctgtactttggcaatccttactccttggcctcccaaaactgttgggattataggt

SEQ ID NO: 25719 - DNA, 201 bp, Homo sapiens
ggagtgcagtggtgcaatcttggcttactgcagtctccgcctcctgggctcaagcgatcatcccacctcggcctcctgagtatctgggggctacaagtacrtgccaccacgcccagctaatttttgtatttcttgtagagatggggttttaccatgttgcccaggctggtctcgaactcccgggctcaagagatagccacc

SEQ ID NO: 25720 - DNA, 201 bp, Homo sapiens
tctcaaatctccccctgttgtgcattcctaccttgagtttaattactcttacatacacacacatacacacacacagtggctgttataaaagaggtaacatygtctctaggaggaatttgtgattcaattgggaaagcttactaaacttaatatttaagtgaataatttagatattacagaagtttcctattgtggagtcag

SEQ ID NO: 25721 - DNA, 201 bp, Homo sapiens
ctgcctttgaagatgtagttaatagaatttaatcttttctaagtgcacattgaagttgccttttatgttcatattatgttcatattttatttgaaaaatckatagcatttttattgtgctgaaagcattaatatttgcagcactttgtgagacaggcaaaattatctttttgctgacttggaaactgcaagagttaaaaga

SEQ ID NO: 25722 - DNA, 201 bp, Homo sapiens
ttgagaggaacaggactttaagcaggaaaaccaattgtgaggctgttaaaatagttcagatgaaatacatgaagccactggtggtagcagacaggacagartaggtgttttggaggcacaatcaataggacttgtttagtttggatgctgttgtggaaggaatgaaaaaaatctagggaggaatcacagcttcaggtttgt

SEQ ID NO: 25723 - DNA, 201 bp, Homo sapiens
ttctgagacagagtctcactctgttgcccatgctggagtgcagtggtacaatcttggctcattgtggcctcataccccagcttatgcgatcctcccacctytgccccccaaagtagctcagactacaggtgtgccactacgcctggctaatttttgtattttttggtagagatggggttttgccatgttacccaggctgat

SEQ ID NO: 25724 - DNA, 201 bp, Homo sapiens
ccttgccaaaatcctggcataggaatttgaaccctggtgtatgaaaagtctgccctttgcatactcaggtttcgcatcccgtgaatgctgtatttttgatycgagtactgtattttttaatctgagtttgattgaaaaaaatccaaatataaatggacccatgcagctaaaacctgggttggtcaaggaccaactataata

SEQ ID NO: 25725 - DNA, 201 bp, Homo sapiens
agatttgatatctgggttctaagactttgcagcctaatgcatgtgtcatgctaaaatagaagtagttagacatgtggagttaaatatggtgatggtttctsagatgattaaaatgactgccaccaggttaaggtagttacaaagcagctttctgtaatggcagcagagataataaactgggcaacaagggaggaaccaatt

SEQ ID NO: 25726 - DNA, 201 bp, Homo sapiens
atgtaactggcctaagagagtctgaagaaaaactaaagcaacaacagcaggagtctgcacgcagggaaaacatccttgtaatgcgactagcaaccaaggamcaagagatgcaagagtgtactgtaagtatttcaagttatataaatgtctttagttgaggaattggtttttagtccacattattacatgttaattttaaac

SEQ ID NO: 25727 - DNA, 201 bp, Homo sapiens
actaaatgacttcttcacattttactttgctaaaggctggcttttatcattttctttacttttttttcccactaacccccccgcccttttcttgagacagrgcctctctctcatccaggctggagtgcagtggtgtaatcacacctcacttcagcttcccgagtaactgatttcaggtgtgcgccaccaagcgcagctaat

SEQ ID NO: 25728 - DNA, 201 bp, Homo sapiens
gaaaggccacacgggcctggtgcggcaccggtctctcgtgagccgctctaccttcccgcctgcggggaacacttccgccgcttcgaggccattttatctcygtcctccgtccccaaggcccgggttgagaggggtgctctggcggccggagagaccggccactcacggaggccggaggatgccctccccgggctgagcggc

SEQ ID NO: 25729 - DNA, 201 bp, Homo sapiens
tgccttagtaactagataaaaggtataccacctagccatagtgataaatatagctgttttcaaactgtcattcacagatctctaccacagtacctgttacrtgaagttcctggttggttctcaaaattttatgttcgtatatacatagatacagatactgatataccggttaaatatgtacagctcaaatagctaaaattg

SEQ ID NO: 25730 - DNA, 201 bp, Homo sapiens
tgacatcttgtccatataatattttgaaatgctgctgaaccttgacatctctacatttcctttttacttacatcattattaagatcactttctgaaaaacygttgtaggctgggaagttagcaagaacaaatcaatttatttctgtcttttggaaggtgaaagtattttcagcctactcgtgctgctgacttaatcttttc

SEQ ID NO: 25731 - DNA, 201 bp, Homo sapiens
cgagtgatctcagtgaatgacagttgtttgctgctcggagtgtggggtgttttttaaaataggaaatgtcagtatcaatctaatattatagaacagtcagwatgtgaaaatgaaaggaccaaatgccaacctcacttggactcttggttcccaacagtaagagaaacaaatttgaaagaggaaggaggtggcatcaggagc

SEQ ID NO: 25732 - DNA, 201 bp, Homo sapiens
ttatatttattttggtgctagctataaataaaagcaaagagtaagtatatccatgtcatgcatatgttcagtaacttagctctgtctcttcaaatctctttgaagtagatctgtaaataaaactcagctcttcagaaacaaatttcttcatgatacttgaactatttagtttgttattattgaggatattctcataaaggc

SEQ ID NO: 25733 - DNA, 201 bp, Homo sapiens
agccagcttggaagttttacagcaataatgttgcagtggaatattatttgtagttaaggtcatcctcctcccctttctgtttttttaaatcaagaactacrttctgcccctctcttgggcttcagaagcatctaagaaaagcagtcatcaattataattaactttcaaagggcaagtcagaagttgtttataaattacaaa

SEQ ID NO: 25734 - DNA, 201 bp, Homo sapiens
ggccggctaatttttttctttttctttttttttttttctggtattttttgtagagatggggttttgctgctgcccaggctggtctcgagctcttgagctcragagatctgcctgattcagcctcccaaggtgctgggattacagacgtgagccactgcactcggccccaacgcattactttgatttaatatttggatcatt

SEQ ID NO: 25735 - DNA, 201 bp, Homo sapiens
cttcatggtctaccaaccaaccccgtgggaggcagcctcagactcggtatttttgttttcatgtacttattgaaaaggtattgtgttaattcttggcattrgataacttacataataataacagtttttacttaccaaatactttccatgtgtcagaccctttggtgagtactcaacagtgttacttcatttaatcctcac

SEQ ID NO: 25736 - DNA, 201 bp, Homo sapiens
tgatacttgaactatttagtttgttattattgaggatattctcataaaggcggaggaaaaatacttttcccaagcaaaatccaagttaaatatgttaaatkaaccaaacactggattgttgaaaaatatttagtcatttattcacctcaattaatgtaactttaggatacagattcttctgtgattttattatcttctcac

SEQ ID NO: 25737 - DNA, 201 bp, Homo sapiens
acttcttaagtactatgtaaagttgtaagagtaaattggaaatcattactgtgtgatgtattatttatttattgaacaagcatcatacctgtatcacttgmtaggcattgcgttagaggcaggagttacaaagataaagtagatgttatccctgtcatcaaaagtcttaagtttcatagtggaaagtggaatggggataat

SEQ ID NO: 25738 - DNA, 201 bp, Homo sapiens
attaaatttttgagggagcaggacttgaagaaagaccagttaggagtctagtatgacttgagatactttgttataaaggtggttgtttaatgaacacttayatttgccaggaattatgctacttgctttatatgttttttctcatttaatccttaaaattacatcatgaagcagttataatttcccccattttacaggatc

SEQ ID NO: 25739 - DNA, 201 bp, Homo sapiens
ctggccaacatggtgaaaccccgtctctactaaaaatataaaaattagaggggcgtggtggtgcacgcctgtaatcccagctactccagtggctgaggcaygagaatcacttgaacccaggaggcggaggttgcagtgagctgagcgcctgggcgacagagcaaaattctgtctcaaaaaaaaaaaaatcattttagctgc

SEQ ID NO: 25740 - DNA, 201 bp, Homo sapiens
atttaaagcttgagcccgaattggtttttcaagatcattctggctgggcgcattgtctcatgcctgtaatcccagcactttagggagccagccgaagaagscggatcatctgaggtcaggagtttgagaccaacctggccaacatggtgaaaccccgtctctactaaaaatataaaaattagaggggcgtggtggtgcacg

SEQ ID NO: 25741 - DNA, 201 bp, Homo sapiens
agtactgttatgatttcagtttttgcatttaaatttttgttccgtcttatatttattttggtgctagctataaataaaagcaaagagtaagtatatccatrtcatgcatatgttcagtaacttagctctgtctcttcaaatctctttgaagtagatctgtaaataaaactcagctcttcagaaacaaatttcttcatgata

SEQ ID NO: 25742 - DNA, 201 bp, Homo sapiens
tgttattattgaggatattctcataaaggcggaggaaaaatacttttcccaagcaaaatccaagttaaatatgttaaattaaccaaacactggattgttgraaaatatttagtcatttattcacctcaattaatgtaactttaggatacagattcttctgtgattttattatcttctcaccccatttaggttgcgagttat

SEQ ID NO: 25743 - DNA, 201 bp, Homo sapiens
gaccccggacttaagcaacaagcgtggtcttgggcgtagctacgaggtggttggtgggctccagggcctgcgtgcccctcgacgtgagcgatgattggcgrtgcaggataacagatcgccttcttggccactcagtggcaggggacttgctacttccgggtcggcggcgtctggcgtggagagtttggggatctacagcag

SEQ ID NO: 25744 - DNA, 201 bp, Homo sapiens
agtggcaggggacttgctacttccgggtcggcggcgtctggcgtggagagtttggggatctacagcagccaaaggcttgtccctgactttatatggctgckcctggcgagcgactgagtcgtccgtgaggaaaaagaggcgaggcttttccgagatcgtctcagcgatggcgcttcggtcgcagttttgggggttctcggt

SEQ ID NO: 25745 - DNA, 201 bp, Homo sapiens
ggggtgtgtgtggaccagtcaatgaccgcccaagctctccgagtagaaaacccaaacatggttttgtggggtgtgtgcctttgaccccggacttaagcaamaagcgtggtcttgggcgtagctacgaggtggttggtgggctccagggcctgcgtgcccctcgacgtgagcgatgattggcggtgcaggataacagatcgc

SEQ ID NO: 25746 - DNA, 201 bp, Homo sapiens
cattaatatttttcttttctgtgaacagtctgtttggataatgctttgcctattaagttatgaaggggtgggttgcccctcctcacctgtgggtgtttctygttaggtggaacgagagacttggaaaagaaaaagacacaaagtatagagaaagaaataaggggacccagggaaccagcgttcagcatatggaggatcccg

SEQ ID NO: 25747 - DNA, 201 bp, Homo sapiens
ttgcatcgaattgtcttgtccatgcattttgttagtgagattgagcatatttttgtgaatttgagtcattaatatttttcttttctgtgaacagtctgttyggataatgctttgcctattaagttatgaaggggtgggttgcccctcctcacctgtgggtgtttcttgttaggtggaacgagagacttggaaaagaaaaag

SEQ ID NO: 25748 - DNA, 201 bp, Homo sapiens
tctgcttgtgattgacaagggcagtgcaccctacagactattttcattcattcaactccaggcactctcccaggtagctgccatgcggcgggtagaggcarggttcgcggaggggctggaacaaacaacaaataggtgtgatgggggctatttaaagaggatgttacagtagcggacaggatacctgcctgtctgaggtga

SEQ ID NO: 25749 - DNA, 201 bp, Homo sapiens
ccattttacaggatcaaagaaattgaggtttagggagacatgattagtaagtgccagagctaagatttacatatgttttaactgacctcagagccaggacrctaggttattaccactatactacagcatgtaagtgtttatcaggtttatctgctgcttatctgcttggtgaggattttttagaatttcttaaggacttct

SEQ ID NO: 25750 - DNA, 201 bp, Homo sapiens
tcttcatggtagttaagagcattgactctggagccagacactgggacttaaaccatggctccattacttactagttttaatctttttcaagttacttaacstttctgtgttagtttctgcagctaaaaaaaaatatagaaaaaataatagaattgagacataagctttatctataaaccgttaagacaggcctggcatata

SEQ ID NO: 25751 - DNA, 201 bp, Homo sapiens
ggcggcgtctggcgtggagagtttggggatctacagcagccaaaggcttgtccctgactttatatggctgcgcctggcgagcgactgagtcgtccgtgagraaaaagaggcgaggcttttccgagatcgtctcagcgatggcgcttcggtcgcagttttgggggttctcggtttgcaggaaccctggtaattagtcttgcc

SEQ ID NO: 25752 - DNA, 201 bp, Homo sapiens
gctgggtgacagtgagaccctgtttctgaaaaataataaaagccatatgacatggtttgatgtcatatttaaatatgcataccttgagattataaaaaaawttctcatgttttcttctagtactgttatgatttcagtttttgcatttaaatttttgttccgtcttatatttattttggtgctagctataaataaaagcaa

SEQ ID NO: 25753 - DNA, 201 bp, Homo sapiens
aaaccctgtctctacaaaaaaatacaaaaattagctgggtgcagtggcatgcgcctgtagtcccagccacttgggaggttgaggtggaaggatgacttgawcccaggaggcagaggctgctgtgagccaagttcgtgcctctgtactctagcctgagagacagaggcagaccctgtctcaaaaaaaaaaaaaaatggccat

SEQ ID NO: 25754 - DNA, 201 bp, Homo sapiens
cttcatgatacttgaactatttagtttgttattattgaggatattctcataaaggcggaggaaaaatacttttcccaagcaaaatccaagttaaatatgtdaaattaaccaaacactggattgttgaaaaatatttagtcatttattcacctcaattaatgtaactttaggatacagattcttctgtgattttattatctt

SEQ ID NO: 25755 - DNA, 201 bp, Homo sapiens
tgatgactcttaacgagcatgctgccttcaagcatctgtttaacaaagcacatcttgcacaacccttaatccatttaaccctgagtttgacacagcacgtrtttcagagagcagggggttgggggtaaggtcatagattaacagaatctcaaggcagaagaatttttcttagtacagaacaaaatggagtctcctatgtct

SEQ ID NO: 25756 - DNA, 201 bp, Homo sapiens
agctactagggaggctgagacaggagagtggcgtgaacctgggaggcggagcttgcagtgagccgagatcgcgccactgcactccagcctgggcaacagastgagactccgtctcaaaaaaaaaaaaagagattgtgattttttactagagccaccaggaaaaccaggagtagactccatatttccaaatctaatgcctct

SEQ ID NO: 25757 - DNA, 201 bp, Homo sapiens
ggatcacgaggtcaggagatcaagaccatcctggctaacacggtgaaaccccgtctctactaaaaatacacaaaaaaattagccaggcgtggtggcaggcrcctgtagtcccagctactagggaggctgagacaggagagtggcgtgaacctgggaggcggagcttgcagtgagccgagatcgcgccactgcactccagcc

SEQ ID NO: 25758 - DNA, 201 bp, Homo sapiens
tgtttttactttttttaagttaaaaaaaaaatcaaaagaatattttgtggcttgggaaaattaaatgaaaatcaaatttcgttgcccaggttcttagaacmtagctgtacctactctcatttgtttacgcatcacctggctgttctagcactacaatggctgagtcgaacagtttcaacagaagctattggacctagaaag

SEQ ID NO: 25759 - DNA, 201 bp, Homo sapiens
gtagagatggggttttgctgctgcccaggctggtctcgagctcttgagctcgagagatctgcctgattcagcctcccaaggtgctgggattacagacgtgrgccactgcactcggccccaacgcattactttgatttaatatttggatcattaaaaataactaaagatgtatttcctcattttttctctgtctgccttact

SEQ ID NO: 25760 - DNA, 201 bp, Homo sapiens
tttttgtagagatggggttttgctgctgcccaggctggtctcgagctcttgagctcgagagatctgcctgattcagcctcccaaggtgctgggattacagrcgtgagccactgcactcggccccaacgcattactttgatttaatatttggatcattaaaaataactaaagatgtatttcctcattttttctctgtctgcc

SEQ ID NO: 25761 - DNA, 201 bp, Homo sapiens
ggcctgcgtgcccctcgacgtgagcgatgattggcggtgcaggataacagatcgccttcttggccactcagtggcaggggacttgctacttccgggtcggyggcgtctggcgtggagagtttggggatctacagcagccaaaggcttgtccctgactttatatggctgcgcctggcgagcgactgagtcgtccgtgaggaa

SEQ ID NO: 25762 - DNA, 201 bp, Homo sapiens
tggtcttgggcgtagctacgaggtggttggtgggctccagggcctgcgtgcccctcgacgtgagcgatgattggcggtgcaggataacagatcgccttctyggccactcagtggcaggggacttgctacttccgggtcggcggcgtctggcgtggagagtttggggatctacagcagccaaaggcttgtccctgactttat

SEQ ID NO: 25763 - DNA, 201 bp, Homo sapiens
cccggacttaagcaacaagcgtggtcttgggcgtagctacgaggtggttggtgggctccagggcctgcgtgcccctcgacgtgagcgatgattggcggtgmaggataacagatcgccttcttggccactcagtggcaggggacttgctacttccgggtcggcggcgtctggcgtggagagtttggggatctacagcagcca

SEQ ID NO: 25764 - DNA, 201 bp, Homo sapiens
gctgggaagttagcaagaacaaatcaatttatttctgtcttttggaaggtgaaagtattttcagcctactcgtgctgctgacttaatcttttccttttttwtctgattttcaaaaccagatgaaacgactacaaagtgccatgacagaaggtggtgtggttctacgggaacctcagagaatctatgaataaatggaagcat

SEQ ID NO: 25765 - DNA, 201 bp, Homo sapiens
ctgactttatatggctgcgcctggcgagcgactgagtcgtccgtgaggaaaaagaggcgaggcttttccgagatcgtctcagcgatggcgcttcggtcgcrgttttgggggttctcggtttgcaggaaccctggtaattagtcttgccccccttctcccagctcactcgcctgggcttgcacagtacattggaacgtgcgg

SEQ ID NO: 25766 - DNA, 201 bp, Homo sapiens
ttaagatcactttctgaaaaactgttgtaggctgggaagttagcaagaacaaatcaatttatttctgtcttttggaaggtgaaagtattttcagcctactygtgctgctgacttaatcttttccttttttttctgattttcaaaaccagatgaaacgactacaaagtgccatgacagaaggtggtgtggttctacgggaac

SEQ ID NO: 25767 - DNA, 201 bp, Homo sapiens
gtgctggcacagagatgcttagaggcgggaatcaacttcatggtctaccaaccaaccccgtgggaggcagcctcagactcggtatttttgttttcatgtayttattgaaaaggtattgtgttaattcttggcattggataacttacataataataacagtttttacttaccaaatactttccatgtgtcagaccctttggt

SEQ ID NO: 25768 - DNA, 201 bp, Homo sapiens
gtggagcacatatgaggttgatgtaaagcacttattactgtgtctagttcatggcgagtgatctcagtgaatgacagttgtttgctgctcggagtgtgggktgttttttaaaataggaaatgtcagtatcaatctaatattatagaacagtcagtatgtgaaaatgaaaggaccaaatgccaacctcacttggactcttgg

SEQ ID NO: 25769 - DNA, 201 bp, Homo sapiens
aggaggaaggggagtgttctcaaactgggaaagggggaagtctgtctgtgccttttggaagatagttttgagcggaaggttagggaggtctccaccttacyttgcctgccctctcctctagggccgcccagtatgcttgctctcttcttggccatgcgctgcagaggcatggagccagtcctgagttacagaaacagattc

SEQ ID NO: 25770 - DNA, 201 bp, Homo sapiens; identical to SEQ ID NO: 19835

SEQ ID NO: 25771 - DNA, 201 bp, Homo sapiens; identical to SEQ ID NO: 19836

SEQ ID NO: 25772 - DNA, 201 bp, Homo sapiens
ttcctgtaccctctctgttcttctttctcatttggctctgcacttaccctctgcatgagtccagttgagataagagagcaggggtatggaagtaattaggyggactggagagaatgggtcaagtttgagaaaactaaactggcacaaaaattaaatttgaaattgaaaaatggactgtttctgctctttattttttatttt

SEQ ID NO: 25773 - DNA, 201 bp, Homo sapiens
tctcttaactctgtttaaggttctgtgtctatgcatctctctctttcttttttcaaccttctcattctcctatccagggatttaatcagcagaattacttkttgataggggaggtataaggtttggcctgtaaggttctaactgccttcttttttctcacagaggtggcttatggcagatttttcctccttcaaactccaa

SEQ ID NO: 25774 - DNA, 201 bp, Homo sapiens
ttttttctccttatgcctttcccttcctctggcctggagaaatggtgagatatgggcatggaggaggaaggggagtgttctcaaactgggaaagggggaartctgtctgtgccttttggaagatagttttgagcggaaggttagggaggtctccaccttaccttgcctgccctctcctctagggccgcccagtatgcttgc

SEQ ID NO: 25775 - DNA, 201 bp, Homo sapiens
acagattcgacaactggagagccacctgagccttggaagaaagcgtaagtaactctgtctttccttttatcccccaacctttcctccatccccagctcacyttcctttgtccctccttcctgtaccctctctgttcttctttctcatttggctctgcacttaccctctgcatgagtccagttgagataagagagcaggggt

SEQ ID NO: 25776 - DNA, 201 bp, Homo sapiens
ggaaaagggaaagaagtcatttatttgcttcgttttgcctttttccagtgtaattgattttaagatagaactgaaagaatattcaacacacactctctctcttttttttttttccttaaacagaactttattttctcacagttctggaggctagaagttcaagatcaagatgtctgcaggtttgctttcttctgaggcctc

SEQ ID NO: 25777 - DNA, 201 bp, Homo sapiens
gggcctacaggcgcacatcaccacgcccagttaatttattataataataataataattattttgagacggaatctcgctttgtcaccaggctggagtgcartggtgccatctcggctcactgcaacctccaactcctgggtttaagcgattctcctgcctcagcctccccagtagctgggattacaggcatgcgccaccac

SEQ ID NO: 25778 - DNA, 201 bp, Homo sapiens
tagctgttcatggaagggtaagaggtctgagacaggcactgaagagggccagttgctgggacagtgtccattcctacgctgccagacgtgagggatggctragtccttttggactctattgctgtgggtgttctgggctgtgggaatcagtaggtctgatcccaaatggcagtttctgtgccgtcccacacggtctgctgg

SEQ ID NO: 25779 - DNA, 201 bp, Homo sapiens
agtgcagcaacacatttctctgacatcagctgcttgaggaatgaatttttgaaaggagttactaaactgtaactgaatatttgtattaacttaaaaaaaawtgaatcgtaagcctgctgctgttgagacagatgatccgaattggtctttttatctttcctgtgttttggttgtcttcagttattttctggtcacttttta

SEQ ID NO: 25780 - DNA, 201 bp, Homo sapiens
gaatcactggagtttccttgggtgaggccctagagctggtagtttggcttctaatgctgaggcctaaagcataattgttgacgggtggttctggagcgatktgtgcaaaaccagtgaaagatgaacactgggccattttaagatggaaacaaggtgggggttggatagagagttatatgcagcctcttttgcacctcgttg

SEQ ID NO: 25781 - DNA, 201 bp, Homo sapiens
taatgaaacttctaggtctatttctagctcaatgtaagacggcatttagttaccataaggacaggttagatagaatctcttccatttagcttttgtatttgtctctcaaagcagatagggtaaccccaaaacttaggaaaacaatgtattttattaaagaaaaataagttaaaacccagtagacacacctacgagatgctt

SEQ ID NO: 25782 - DNA, 201 bp, Homo sapiens
cctttccagtgttaagtgagtcagacagagcatcgctgcccgtgatagccactgtttttgataaactcaaccatgagtataaaaagtacctggatgccgascagagttatgcgatggtgagttacatggagtatgacaaagggtcctcctcccccaccccctcccgggtattttctaagtaattatgatgcaaaattgttt

SEQ ID NO: 25783 - DNA, 201 bp, Homo sapiens
cctgctatagcttttttttttttttttttttttaaccgtaaccagaaaggggttgcgaatgacatctagctgtcaggtctttaaagtattgtatttcttaragtgtcctttaaaggtacttttgcattggtaaccttttgagattagtttttatcatagcaacgtgtggaaattctgaagctgacatgaagttggtttgat

SEQ ID NO: 25784 - DNA, 201 bp, Homo sapiens
gggtccacatcgaagaattcagtccttgtggatgaactgtaaacagcacccttcctctaagatgccgaagatcatagtttgtggtttttttctttcaggcrgtggaagcagggcagagccgaagcagcccgctcctcaagaggccggtgcggacccaggcggtgctggaccagtcagatgtgtacacccatgtcctgtcag

SEQ ID NO: 25785 - DNA, 201 bp, Homo sapiens
atctaagtagagaaagtgttttccgctcatatcctgggtccacatcgaagaattcagtccttgtggatgaactgtaaacagcacccttcctctaagatgcygaagatcatagtttgtggtttttttctttcaggcggtggaagcagggcagagccgaagcagcccgctcctcaagaggccggtgcggacccaggcggtgct

SEQ ID NO: 25786 - DNA, 201 bp, Homo sapiens
aaaaaattgaatcgtaagcctgctgctgttgagacagatgatccgaattggtctttttatctttcctgtgttttggttgtcttcagttattttctggtcaytttttaagttaatatttatttttcttgtcttgtagtatgccaacgtaggttggcagtatgctgcctaatccaaatttgtgtgtgtctgtgtgtttttcct

SEQ ID NO: 25787 - DNA, 201 bp, Homo sapiens
cctcaaaacgatccgcccgcctcagactcccacagtgctaggattacaggcatgagccgctgcacccggcctgagcaaggttttaaagtatggatggggtkcgagcatggtgttttggggaactctgggtctgtgtaactgaaggttacatagggtgtctccacagggaaggggaaatggtggtggtgtggccactggcag

SEQ ID NO: 25788 - DNA, 201 bp, Homo sapiens
taggtcactttgagtgagctcatcaaaggaagcatgtcataaatgcaggaaatacttgtgagaggagataaaaatattaaaagagagttgtgatgttaatsacaaattccttctcaagtaagagctagcctgtagggaggaaatgcaaacacaggcttttaaactgatttaaacagcaagatgggatggaatgaaagcaac

SEQ ID NO: 25789 - DNA, 201 bp, Homo sapiens
aaacgagtgagcccgtgataatctagattgggggctctaagaagtttgtgggtggggggaaggtactgaatttaacttaaaaagagtttttagactgggcrcggtggctcatgcctgtaatcccagcactttgggaggccgaggcgggtggatcacttgagatcaggagttcgagaccagcctggccagcatggtgaaacc

SEQ ID NO: 25790 - DNA, 201 bp, Homo sapiens
gaaaaaaaaaaaaaattggcaaaatgtctgaataagactagaaagtgcatttttatgctaagagttttggtcttccagatggaaatgggtttggtagtctyaagtagtttagaaaaaagtgattgtgtcagttgattaaagataattcaaaactatttcagaaactaacgcttgagatttgaccttggaagaaggtgggaa

SEQ ID NO: 25791 - DNA, 201 bp, Homo sapiens
acttctgattcttctgtggcctaaaacagtggcccaaactttcaaactttatggtagttagtataatgttctttcatttcttcttcctttttttttaaacrtactcttctgtggcattcctgtttatttttaaattttttttggagagtgtcgctctgttgcccaggctggagtgcagtgttacaatctcagctcaccaca

SEQ ID NO: 25792 - DNA, 201 bp, Homo sapiens
cctcagcctcccaaagtgttgggattacaggcgtgagccaccacgcctggcagtacggaggtatattttcatttgaaaaagtggatatctcagtttttaartttgtaatgaaaattttaaacacacaatagagactaataaaaaagaacccctgtatgcctgtatctgattcgacaatagtcaaaattttgcttctaagtt

SEQ ID NO: 25793 - DNA, 201 bp, Homo sapiens
ttagctgttcatggaagggtaagaggtctgagacaggcactgaagagggccagttgctgggacagtgtccattcctacgctgccagacgtgagggatggcygagtccttttggactctattgctgtgggtgttctgggctgtgggaatcagtaggtctgatcccaaatggcagtttctgtgccgtcccacacggtctgctg

SEQ ID NO: 25794 - DNA, 201 bp, Homo sapiens
ccccgaaaagtttccttgggcccttctgtaatccatcccttgagttttttttttttaaatgaatttttaatttaaaaaatgtatgtattggaatagagacrgggtctcactgtgttgctgaggctggtctcgaattcctgtgatcctcctgcttcatcctctcacagtgctgggattacaggtgtaggccgctgtgcccag

SEQ ID NO: 25795 - DNA, 201 bp, Homo sapiens
aagagttatgggcaaaaatcagggaacattgtatttaaaagaaaatttgttttgttaattagtaaacattccggggaacgttcattaaagaatgacaaacygcagagtttgtgaagcttttgaagagagttatatgtgttttttcttattaattaaaaatatttttaaaaaatttttcttagactaagaatgccaacattc

SEQ ID NO: 25796 - DNA, 201 bp, Homo sapiens
actctgtatcctttactaaggtgtggcaccgtgcacaacagggcaagtggtcaccctcagagagtggtcctgaagtcctcctccgggcagctgtgaataamactccgagagccaccccgcaggcagcttccctgactgtccaggggcctcgcgtttagcgtggactcagtacatggtgggcaggggcgagtgctagcggaa

SEQ ID NO: 25797 - DNA, 201 bp, Homo sapiens
cagcccgctcctcaagaggccggtgcggacccaggcggtgctggaccagtcagatgtgtacacccatgtcctgtcagccttcgtggaaaagaaggtgggcygcagctttccgcctcttctggactgagaatgctcaaaacaaggaagttgctgaaaacgaggagacttcatgtgattagagtcacttgaagtgattagaat

SEQ ID NO: 25798 - DNA, 201 bp, Homo sapiens
aggcgaaccctgtcaactgcgtcttcttcgatgaggccaacaagcaggtccggcgcgcccgcgcttcctcccccgcgcggccctgccggggtcgtgggcgygccaaggccggtcccgcgcgaccaggcccgagcgtcccctcctgtcctgtcccgtcccgtcccagcgcgggaggcggcgcgcgctccttccttgttgggt

SEQ ID NO: 25799 - DNA, 201 bp, Homo sapiens
aagcagggcagagccgaagcagcccgctcctcaagaggccggtgcggacccaggcggtgctggaccagtcagatgtgtacacccatgtcctgtcagccttygtggaaaagaaggtgggccgcagctttccgcctcttctggactgagaatgctcaaaacaaggaagttgctgaaaacgaggagacttcatgtgattagagt

SEQ ID NO: 25800 - DNA, 201 bp, Homo sapiens
tcaagggtttagacgtcgagattttcattttccttgaaattttgtaaagggggaaaagactgtacttcaggcgtatcagcggcgccgatgcgcgaaccggygttagaacttggagcctcgggaacccgacccggtgtcacggtggcatccttttcgctctctgctcttggtttttaaaattcacctgagcagccaaacatc

SEQ ID NO: 25801 - DNA, 201 bp, Homo sapiens
gcatagtcccagttcgcactgttgaacaggtttaatgatcaacagcagggcctttcactttcagaagtgtctcgatttggatgataagctatctggccacygtaacactggtgcttacagaaggtgaaagtataatgtaggccctcaattcagtagtgacttaaaaaattttactgttggtctgtgttaatgagaaactgt

SEQ ID NO: 25802 - DNA, 201 bp, Homo sapiens
aggggaatgttgtatataaacttttgcagctagctttttttttttttgtccaaagtgtatcttggacatctttctatattttattctgactgggtagtatyccactgtatggatggactgcagtttaaaaattttcttgttattggacattggctggttttccatttttttgtgattacaaataacccttcagtaacatgc

SEQ ID NO: 25803 - DNA, 201 bp, Homo sapiens
attagaataaggtcgctgagatttgccgcctgccatagggcaaggtggcagtagtgggggatagtggaggagtagtaaattcagggtccctgcatcccackagctggcggctgcatctcacttcataccttcactgtttttgtttttcccatctgtgtttgatcttgcctgtagatccttggtctactgttatagatgaga

SEQ ID NO: 25804 - DNA, 201 bp, Homo sapiens
gctggaatacacacaggagtgcaaggtatgaccccaggccctttctcagctgctggtgtcagtggtgttgagctgggttatgtagtggagagcggggcatyggggtcgcagggagcacagacttgaagtcagactgtccctcatgttgattcccaaactggagtcaggcggggtgtttgctttgtgacactgaacagtttt

SEQ ID NO: 25805 - DNA, 201 bp, Homo sapiens
ttggatcccagttgtagccagggacgttttcaaggtgaatctcttagaaatgacccctcctttcaagcgtgggaatgggatttttttttttcactttatamgttttttactatatgtgcattttatcaagaacatatactacttttaataattaaagcaacaactaagaatgccattctcctgcttaagcccattctggaa

SEQ ID NO: 25806 - DNA, 201 bp, Homo sapiens
ttttctgactgcatcgttgcacttatgttttctcaatttgtaggtcctgctgccgtgaccagccagtctcctgttccatgtaaactctgtatcctttactraggtgtggcaccgtgcacaacagggcaagtggtcaccctcagagagtggtcctgaagtcctcctccgggcagctgtgaataacactccgagagccacccc

SEQ ID NO: 25807 - DNA, 201 bp, Homo sapiens
gcataattgttgacgggtggttctggagcgatgtgtgcaaaaccagtgaaagatgaacactgggccattttaagatggaaacaaggtgggggttggatagrgagttatatgcagcctcttttgcacctcgttggtatttgtaagaccacatttttttctccctaggagatgcctcataaatttgtgatagccgtgctgatg

SEQ ID NO: 25808 - DNA, 201 bp, Homo sapiens
atggatgacagtgctgggggataatggttttgaggccgtgtggaccaggacaactagaatgggtcctgtgggctgggcctctgatataaagaagctgcttmcctcctctaccctcccagagggtggtgacgctaactctgtgacacgtgaggatgtttccagttgaaatgacagagatctgcttaggtcactttgagtgag

SEQ ID NO: 25809 - DNA, 201 bp, Homo sapiens
cataaatgcaggaaatacttgtgagaggagataaaaatattaaaagagagttgtgatgttaatgacaaattccttctcaagtaagagctagcctgtagggwggaaatgcaaacacaggcttttaaactgatttaaacagcaagatgggatggaatgaaagcaactgggcaaaccatgattgattttggcctcagtcttgtc

SEQ ID NO: 25810 - DNA, 201 bp, Homo sapiens
ttgattaaagataattcaaaactatttcagaaactaacgcttgagatttgaccttggaagaaggtgggaatccgctccattccacgagtacttgaactctstgttgcaattgtgagcatggatgacagtgctgggggataatggttttgaggccgtgtggaccaggacaactagaatgggtcctgtgggctgggcctctga

SEQ ID NO: 25811 - DNA, 201 bp, Homo sapiens
caaagacatggaatcatcctaaatgcccatcagtgacagattggataaagaaaatgtggtacatatataccatggaatactatgcagccataaaaatgaayaagatcatgtcttttgtgggaacatggatggagctggaggccatcatccttagcaaactaacacaggaacagaaaaccaaataccacatgttctcacttc

SEQ ID NO: 25812 - DNA, 201 bp, Homo sapiens
gtcaccctcagagagtggtcctgaagtcctcctccgggcagctgtgaataacactccgagagccaccccgcaggcagcttccctgactgtccaggggcctygcgtttagcgtggactcagtacatggtgggcaggggcgagtgctagcggaaactgggtttgctttttgttttcatcttttcctggtttagaatttcctat

SEQ ID NO: 25813 - DNA, 201 bp, Homo sapiens
gcaagactccgtctcaaaaaaaaaaaaaaaaagatttttaaaagcagctttattgaggcatagttgacacataataaactgtacacacttaatattatgcmatatgtgagttttgacatgtatacacccatgaaaccatcaccacaatcaaggcaatgaacatgttcagaccccgaaaagtttccttgggcccttctgtaa

SEQ ID NO: 25814 - DNA, 201 bp, Homo sapiens
aatttagaatgtatggttagagaaaatacacctgtgtgttaatgccatggtgctttgctgtaaggccatcatcgaaatcttagtaatgactggctgggcayggtggctcatgcctgtaatcctagcactttgggaggccgaggtgggcgatcatctgaggtcaggagttcgagaccagcctggccgccatggcgaaacccc

SEQ ID NO: 25815 - DNA, 201 bp, Homo sapiens
gacctccaacagcacaggagcggaggtggtcctctatcatctaccacggtagatttcatgctttgttttccctctctctctgattttaaaatgtgaactgyagcttgttgatctgttttttgctttctatcctacagagaaggtgcctgtaaaaagatgcacatattgaagttaaataggacgggaaagtttgccctgaac

SEQ ID NO: 25816 - DNA, 201 bp, Homo sapiens
ctcagtcttgtctttttcccccccagacatcggtaatattcgatatcaagttacggggagagtttgacggctccgttaccttccaccaccccgtgcttccygctcgatcgatccagccctatcagatccccatcacaggtaacacgggttctgtagaggagtctgtgctgccctttcaccatgtggctgtgttctcaccat

SEQ ID NO: 25817 - DNA, 201 bp, Homo sapiens
tggctgtaggtttgttactgtaacctgggatcacttttctctttctcacattccgtgtgacagtgatgatgaatattgcattctttgggactgacagtcamagtaagtgcttcggctgtggctcttaggcttacccaaatcagtcctccttctgtctggagaggtggggttgggaagtcagaagagtggaggtcaggaatt

SEQ ID NO: 25818 - DNA, 201 bp, Homo sapiens
tcatctttggagaaatgactaattcgggtcattgtgcctatttttaaaatcaaattactattatttgttgaattgtagttctttatatattctgatattarcaccttcttagagatacaatttgcaagtattttctccgaatccggaggttgcctttccactctgtggattgtgtcctttgatgtacctgcctgtttcttt

SEQ ID NO: 25819 - DNA, 201 bp, Homo sapiens
tgtgttggttagaatagccagtccttggggagcctctagtctgttgtagctgaatgatttggaagtgttctttcactttttacttttgtcctcagcattayctacatgaacttgttatcaaaacccttgtccagcacaacctcttttatatgctgcatcagttcctgcagtaccacgtcctcagcgactccaaacctttgg

SEQ ID NO: 25820 - DNA, 201 bp, Homo sapiens
cattttcagaggttagtgactctccttttgtttcctgctgggctgtgagccctggcggcttgatgcatccgtgtgtcttgcccactgtgctgccactgggtgggcgtgctcaggaattgaatgggcctgttgagaaagatataaccagcacttttgggaagagtcagccaccctttttctttttgttttgggcctgttaga

SEQ ID NO: 25821 - DNA, 201 bp, Homo sapiens
ggcagcttccctgactgtccaggggcctcgcgtttagcgtggactcagtacatggtgggcaggggcgagtgctagcggaaactgggtttgctttttgtttycatcttttcctggtttagaatttcctataacatgtggattcttcatcttggattgtctttcaacctgacatcattatcagcgcaagccaaggtaggtcag

SEQ ID NO: 25822 - DNA, 201 bp, Homo sapiens
agcccaacacaaattcttaaactttcttaaaacattatgagatttttttaatgatattttttaagctcatcagctattgttagtgttagtgtattttatgygtggcccaagaccattcttcttcttcctcttaaggcccagggaagccaaaacattggacacccctggcttagaaccttcagctctgttccggtggtacag

SEQ ID NO: 25823 - DNA, 201 bp, Homo sapiens
tgggtctcaatctgactacatattaggatcatctggggggccttaaaaatgaaagctctcacctgacagtgtgtaggtcagccacccaaaggtgagggctrtgcactcggcgcagaccttgacacttaggtccaaagcgcgagtgctcttcgccaaagcttgtctgcctgggctctttcctacctttgggtggtctgttca

SEQ ID NO: 25824 - DNA, 201 bp, Homo sapiens
gcttataatcccagcactctgggaggctgaagcaggaggattgcctgagcctaggagttcgagaccagcctggacgacaacatggcaaaaccctgtctctmcaaaaaaaaaaaaaaaaaaaaaaaaaattagctgagtttggtggtatacacctgtggccccagctactccagaggctgccgagggaggattccttgagcc

SEQ ID NO: 25825 - DNA, 201 bp, Homo sapiens
ttcagtccttgtggatgaactgtaaacagcacccttcctctaagatgccgaagatcatagtttgtggtttttttctttcaggcggtggaagcagggcagarccgaagcagcccgctcctcaagaggccggtgcggacccaggcggtgctggaccagtcagatgtgtacacccatgtcctgtcagccttcgtggaaaagaag

SEQ ID NO: 25826 - DNA, 201 bp, Homo sapiens
gtgcccttttctgttctgcatgagcccgggaggtgtgctcctctttctggccttgctgaggaagcctcctcagtctgttaattgtctcttcctgggtaatytctttattagagaaatcttttttttttttttttttttttttgagacggagttttgctcgttgcccaggctggagtgcaatggcgtgatcttggctcactg

SEQ ID NO: 25827 - DNA, 201 bp, Homo sapiens
gggtattttctaagtaattatgatgcaaaattgtttcctatatattagaataaggtcgctgagatttgccgcctgccatagggcaaggtggcagtagtggkggatagtggaggagtagtaaattcagggtccctgcatcccacgagctggcggctgcatctcacttcataccttcactgtttttgtttttcccatctgtgt

SEQ ID NO: 25828 - DNA, 201 bp, Homo sapiens
cattctcctgcttaagcccattctggaaaagccagactccaccccagggtggatggaaagccggactccaccccagggtgtctccctcatttctcccatcraccttcccaccggtgtccgtgcccttttctgttctgcatgagcccgggaggtgtgctcctctttctggccttgctgaggaagcctcctcagtctgttaat

SEQ ID NO: 25829 - DNA, 201 bp, Homo sapiens
gaacgctgaggcaggagaatcacgtgaacccgagaggcagaggttgcagtgagccgagatcatgccactgcactgtagcctgggcaacagagcaagactcygtctcaaaaaaaaaaaaaaaaagatttttaaaagcagctttattgaggcatagttgacacataataaactgtacacacttaatattatgcaatatgtgag

SEQ ID NO: 25830 - DNA, 201 bp, Homo sapiens
ctgactgccctgtcttgctggaccagccaaaagcttagttactttctggcacagttggaggaaggagctggttcttaacagacgttcaattaggtcttttkgctttctgtgttctttcaagcttcttccttttcctttgtaaataatgttagtattgaaagaatagattttgccaagtgattgtcttgtgtctgctgccca

SEQ ID NO: 25831 - DNA, 201 bp, Homo sapiens
tggctactttgtgaattagccttttcatctctcatttctgagtgctagatctgataggagcagatattccaagttgaagcagcctacaggcactttagccygtgtaaatgttcaccattgccgtttgtagagtagagggaaggctgttagaaacaggcagaatcctctgttagtttcttccatcagttttaagtgttaaag

SEQ ID NO: 25832 - DNA, 201 bp, Homo sapiens
ttagtctcttgctggggattttattctttttttttttttttataattgcaagtaataaattaaaaaaaaaaaaaagaaaagaaaaagggcttggtggcccrtgcctgtaattccagctctttggaaggccaaggtgggtggatggcttgagtccaggagtctgagaccagccaggccaacatgatgaaatcccatctctat

SEQ ID NO: 25833 - DNA, 201 bp, Homo sapiens
aacgatcatgagtcatctttggttattaaaaataacccaaaccacagtgattgaagccttgacatgctttctttttcttggtgagattttcctggattgtyagctccttcccccttcctccccgtacgtgctttcagtgagacggaacagttcatttcttccttgactacaattgaataaacatttcgtaatgacattaaa

SEQ ID NO: 25834 - DNA, 201 bp, Homo sapiens
tctctcccggctctcttttgaaggagattggagtgcagaattggctagtctgaggtttcagtgtgcaagacgtagtcagatggctcacatttggaaccctrgtagtaatgttttattctttgtccgatggcattgggcgggttgacccagcctgcagtcaggatttccttgtaccgttcacccgggagttcagaatcgcac

SEQ ID NO: 25835 - DNA, 201 bp, Homo sapiens
ttttgtccaaagtgtatcttggacatctttctatattttattctgactgggtagtattccactgtatggatggactgcagtttaaaaattttcttgttatkggacattggctggttttccatttttttgtgattacaaataacccttcagtaacatgcttgtacacacttctttatattagagggagagttgcagtatagg

SEQ ID NO: 25836 - DNA, 201 bp, Homo sapiens
catgctttctttttcttggtgagattttcctggattgtcagctccttcccccttcctccccgtacgtgctttcagtgagacggaacagttcatttcttccktgactacaattgaataaacatttcgtaatgacattaaaaagtattgacttttgtgtcataagtaccagcatttgcagcattttctgactgcatcgttgca

SEQ ID NO: 25837 - DNA, 201 bp, Homo sapiens
ctgagctttagaatggatagttttgattagccgttgatggtgaaatatgttttaatattgaatacacccgtaacgttttctgtttgccttagctctgtaaygctgaaattaactttggctgtaggtttgttactgtaacctgggatcacttttctctttctcacattccgtgtgacagtgatgatgaatattgcattcttt

SEQ ID NO: 25838 - DNA, 201 bp, Homo sapiens
ttttgccaggggccatttgttccagttttgttgttgttttgagacagtctcactgagtcacccaggctggtaggtagtgtcgtgatcttggctcactacartctccacctcctgggttcaagtgattatcctgcctcagcctcccaagtagtggggattacaggtgtgtgccaccgtgcccagctaatttttatatttttt

SEQ ID NO: 25839 - DNA, 201 bp, Homo sapiens
agacatatcatattcatggattaaaagactcaagatgatgtcagttttccccaaattgatatacagatttaatgcaatttctgtgaaaatcccagcaagaytttttttgtagataagatggttctaagatttatatggaaaggcaaagaaactaaaatagctaaagcaatttatttattattattattattattttttgag

SEQ ID NO: 25840 - DNA, 201 bp, Homo sapiens
atttattattattattattattttttgagatggagttttgctcttttgcccaggctggagtgcagtggcatgatctctgctcactgtaacctccaccttcyggtttcaagcgtttctcctgccttagtctcccgagtaggtgggattacaggtgcccgccaccatgcctggctaatttttgtatttttagtagagacaggg

SEQ ID NO: 25841 - DNA, 201 bp, Homo sapiens
cttcctctgtggtcccccaagtaacaaacaactaaatatcttatcttatttagttagtcaagacagtctcactgtgtcgcccaggctggagtgcagtggcwcgatcttgactcattgcaacctccacctcccgggttcaagcaattctcctgtctcagcctcctgagtagctaggattacagttgcccgccactaagccag

SEQ ID NO: 25842 - DNA, 201 bp, Homo sapiens
agtgtgcgatctcagctcactgcaagctccgcctcctgggttcacaccattctcctacctcagcctcccaagtagctgggactacaggcgcttgccaccaygcctggctaattttttgtattttttatagcagagactgggtttcaccgcgttagccaggatggtctcgatctctggacctcgtgatctgcccacctcgac

SEQ ID NO: 25843 - DNA, 201 bp, Homo sapiens
gaagctgcgagacgccttcacctggaacatgaatggtacaaggcagtcgggcttggctgggcctggccccaacccctgtgtgttacgtgggaacagtcccstttcctgccagctgcctgtcaggcagattctggacctgacacgcaggacattggggcatagttttggagggtgtgggctctgggttcagtcctggttctg

SEQ ID NO: 25844 - DNA, 201 bp, Homo sapiens
cagctactcaggaggctgaggcaagagaattgcttgagcccgggaggcggaggttgcagtgagccgagatggtgccactgcagtccagcctggctgacagygagactctgactcagtcagtcaatcagtgtttggtagaattcaccaatgaagccatcaggtctaaggcttttctttgtcaggaagattttattattgatt

SEQ ID NO: 25845 - DNA, 201 bp, Homo sapiens
gctccacaaccatcaacaggaaccgcatgggccgagacaagaagagaaccttccccctttggtgtggatgcatcgctgcactcaccctccgtgctgattcygccttagttctccagcacgtttcagttccttcctccccagaaaaacactctgctttgaccttgtgctccccacaacgccacagtacctcctcgcctttga

SEQ ID NO: 25846 - DNA, 201 bp, Homo sapiens
aaactgttttgagaaagacttctctgtgtgagcggtgatacctttgaggctttctcacgcttcgcagcacaatctggctggggtctgtgtgtttgctccgtcctcctcctgccctatgtatctctccagggctccgctgtgccaggtagggttagaagcacctaacacaatagctggcaaagacttggagttctgtcaggg

SEQ ID NO: 25847 - DNA, 201 bp, Homo sapiens
aactgttttgagaaagacttctctgtgtgagcggtgatacctttgaggctttctcacgcttcgcagcacaatctggctggggtctgtgtgtttgctccgtcctcctcctgccctatgtatctctccagggctccgctgtgccaggtagggttagaagcacctaacacaatagctggcaaagacttggagttctgtcagggt

SEQ ID NO: 25848 - DNA, 201 bp, Homo sapiens
actgttttgagaaagacttctctgtgtgagcggtgatacctttgaggctttctcacgcttcgcagcacaatctggctggggtctgtgtgtttgctccgtcctcctcctgccctatgtatctctccagggctccgctgtgccaggtagggttagaagcacctaacacaatagctggcaaagacttggagttctgtcagggtg

SEQ ID NO: 25849 - DNA, 201 bp, Homo sapiens
aaaagccctgttgaaagttcactttgaagggaagcccatggggtcatggcgacaacacttgttatggaaaggccctggcgcctccagcagctcccttgagrttcaggtgactggagcatccactgggtgccagcagtgctgctgggaggagcagggcacagacaggggccaaagctttctgaggattctccatctatagct

SEQ ID NO: 25850 - DNA, 201 bp, Homo sapiens
ctaacacaatagctggcaaagacttggagttctgtcagggtgaacctcaagtccttgcctccacggagccctggcctgcccccaccatccaccattcagtygtcctgccccacaccctctctctctgctcttgcccagactgttattttggtcagggtgacccctgcccagggttcttcatctgttgaacttgaattatgt

SEQ ID NO: 25851 - DNA, 201 bp, Homo sapiens
tccccaagagccagtccctccatctctcccagccagagctcagtgcctgacttccataccctcctcggcagtggggacattgattggatccatggtacagkggggcaagctgctggccacaggacatgtgtgcgcaaggccactatgcccacacctcaggggaaccagggcagagaacagcctgttccctttggcagtggg

SEQ ID NO: 25852 - DNA, 201 bp, Homo sapiens
tatcttcccaaagtactccattgcttggaatcctcctgggactccctcagggcagtggccagtttgcatagcctgagggaagaactgtgggtgcttcgacrcccgctagctttgcagcatccctgaccactgctcctcacggaatctgtgctctgtggtctgtttgtacgtcctcagcagttcctccattcacctgccttg

SEQ ID NO: 25853 - DNA, 201 bp, Homo sapiens
atgtctgggtgttgttccaacactgcccaggtcgattctattgcagacagactggtgcttgttatttatggccccaactgtccccattagaccgtggcccygggacccctgctagcctcgtctgctgcctcagctgttagctgacaagcggccatcttccccagatgggtttgcagaggcctgctgtgcagagagagaggc

SEQ ID NO: 25854 - DNA, 201 bp, Homo sapiens
gtacagttcactggtcatgccccagaacagggacaggacagcccatggggaccaggccaccagtgctgcacaatgcctgttatctctgccaagctccccgyttatctctgctggcccacatcatagttatttgttaattcttttctctccctctccatttcaaccctttaaggtcaggggccttgtttttcattgccgttt

SEQ ID NO: 25855 - DNA, 201 bp, Homo sapiens
ccagttccagcaggggttggggggcaggggaggaagctggggacatggtgctgctgcagtttgagccatcagaccctgtggcactgtccaggccccgtccrgagagtgcatggggtgagatgtgagtcagggctggggaggtgggcaggggcctggccctgctgtgcacctgcttgggagtcctggccccgtcttagctct

SEQ ID NO: 25856 - DNA, 201 bp, Homo sapiens
ctctccatttcaaccctttaaggtcaggggccttgtttttcattgccgtttttcttcttttttttgagatggagtttcactcttgttgcccaggctggtgwgcaatggcgtgatctcagctcaccacaacttccgcctcccaggttcaagtgattctcctgcctcagcctcccgagtagctgggattacaggcatgcgcca

SEQ ID NO: 25857 - DNA, 201 bp, Homo sapiens
gtggcacgatcttgactcattgcaacctccacctcccgggttcaagcaattctcctgtctcagcctcctgagtagctaggattacagttgcccgccactawgccaggctaatttttgtatttttagtagagacagggtttcaccatatttgtcagtctggtctcaaactccttacctcaggtgatccacccacctcagcct

SEQ ID NO: 25858 - DNA, 201 bp, Homo sapiens
gtcttggcacacaggcaaaggagtgattagggccctgagtgtctacacttggctacagaaggcaagtttttagagatttatatccacatgcttgttttggkctctaaaaaagttaaatgaggctgagcacagttgctcacgcctgaggctgaggtgggcagatcactttaccccgggagttcaagaccagcctgggtgtca

SEQ ID NO: 25859 - DNA, 201 bp, Homo sapiens
atccatggctgtgtaattatcaccaccatccatctccagaattctatcatcatgtaaaactgaaactgtccatcaaacactaactccccattccccctccscccacccctggcaagcaccattctgctttctgtctctatgaatttgactactcgaggtgtctcatttacattcctaagggaatcatgcagtatttgtcct

SEQ ID NO: 25860 - DNA, 201 bp, Homo sapiens
gggaggatagcttgagcccgggaggttgaggcttcagtgagccgtgattgagccactgcactccagcctgggcaacagagtgagaccctgtctcaaaaacwttttttttaaagttaaaaaaaaaaatcaaatgatagattcaggaagccaagtgaagcccaacatgattaacccaaagcaatccatgccaagacacatcat

SEQ ID NO: 25861 - DNA, 201 bp, Homo sapiens
agacattggctcaagacagggcttagggatgccttagctgagccctgcctttctggtgtagtcacgtaagaccgatggcagcaggagcgaagggcagaaargaaggtccccaccagcacagggcacaggggagatgggatgaaggtaaggtgggactcaggtgcccccggggtcacttcagggcctcccgagggtgactgt

SEQ ID NO: 25862 - DNA, 201 bp, Homo sapiens
agaccgatggcagcaggagcgaagggcagaaaggaaggtccccaccagcacagggcacaggggagatgggatgaaggtaaggtgggactcaggtgcccccrgggtcacttcagggcctcccgagggtgactgtgctgggccctgagccagagcccctcatggcagacagggttgtggggtcagccttgttttggggatggg

SEQ ID NO: 25863 - DNA, 201 bp, Homo sapiens
cgaagggcagaaaggaaggtccccaccagcacagggcacaggggagatgggatgaaggtaaggtgggactcaggtgcccccggggtcacttcagggcctcycgagggtgactgtgctgggccctgagccagagcccctcatggcagacagggttgtggggtcagccttgttttggggatggggaactggaaggacaaggac

SEQ ID NO: 25864 - DNA, 201 bp, Homo sapiens
tcacaccactgcactccagcctgggtgacagagcgagaccctgtctccaaaaaaaaaaaaaaaaatagcgaggttgaactctcccggctcagcaggactcyaggactgggaagccccgtggttcctcaccctgtcctctgtgttgggatggggtgggggtgcagcaagcatccctacatcaaaacaggatgttcagattta

SEQ ID NO: 25865 - DNA, 201 bp, Homo sapiens
ctgcttcacagacagggcagcccagagaggaggctggggggctggtgtctgatgcctccctgttccctcggggtgttgcctgggagtgcagctgtagcgtscattcaccctgcacagagccaagccctatggccggagagccagtcaagggtggcctccctccaccagagttgactctgaggccccgggaggcagtcatgt

SEQ ID NO: 25866 - DNA, 201 bp, Homo sapiens
cactgagcacctcctcccgcagaggctgatccagtcagaaccctcgtcttgggctcacaggtgcaggtggtaggctggctgcccccagcatccagcccctrcggtgttgaccttcacctagtcctgcagccgctgccagtgcccacagtccagggtcaggaactgaagtccccggggcctcttgacaggtccttgcaacat

SEQ ID NO: 25867 - DNA, 201 bp, Homo sapiens
cagagtggctccagagcagaccccctggggagtccctggtggtggcaggtcaggatttagaggcagaggcgggccccttctttatctcatcgaccacttastgcattccagttgcagggcctgggggcatcacagaccccctgctccctgctctctcttatgctgagaatgcaggtttcaaatctttggggttaaaggcaa

SEQ ID NO: 25868 - DNA, 201 bp, Homo sapiens
gcaggtcaggatttagaggcagaggcgggccccttctttatctcatcgaccacttagtgcattccagttgcagggcctgggggcatcacagaccccctgcyccctgctctctcttatgctgagaatgcaggtttcaaatctttggggttaaaggcaaaggccatcccgctgggaccaaggtgagcacacgtccctatcaca

SEQ ID NO: 25869 - DNA, 201 bp, Homo sapiens
cgaagttactggcacctcccctgggccagccctgtgttcctggccagggacgggaggagacagtgccctgtctggcagaggaaacagattcatgtgcatgrctatcagtgtgccatggccacagaaagcaccggaggctgtgggcatgaggaagggcagttgggggcatagaacctggggtgaggatggccagggcaggtg

SEQ ID NO: 25870 - DNA, 201 bp, Homo sapiens
ttcagacactctgggggctctgtgggagacactcccatggagacatttgggtgtggacacagcatgtccttgggcaggtggcaaaactgcttcccacgtgrcaatggcgccttgtagagagctgccctgggcctgggtgtgtctgtgagcatgtgcgcgatgcttcgtagtctgccctgtttgtttgtgtctgtaggtgct

SEQ ID NO: 25871 - DNA, 201 bp, Homo sapiens
ggtcttgatctcctgacctcaggtgatccatccgccttggcctcccaaagtgctgggattacaggcgtgagccaccgcacctggcctggtttcgaactctwgacctcaggtggtctgcccatcttgaccttccaaagtgctggagctacaggcatgagccactgcacctggtgcttttggtaaaagcaacctggaatttgg

SEQ ID NO: 25872 - DNA, 201 bp, Homo sapiens
gaatttgggagaaaagatcaaacgcttcatgggacatgggttatttaaattaccttggatgtcacctctggaaggtatttatcaacccatcttctcaactyctactgctgtggaagctgagaggccagaggccttgcctagtccatctcaggatggctggtatgtctaaaatgacagcctgatcatgtctcttccttcaaa

SEQ ID NO: 25873 - DNA, 201 bp, Homo sapiens
ggctggttcagaggaaagccaggaaggcaagcccagtttcctaagttctgaaggggctttggggggcatctaggagactcagagccctgcagggcctgcarggtagtcataggggggagtattgtcaatttcttttaaaaaacctaatggaaactctacatttaccatgatactggatgatactgacacacaagccaaata

SEQ ID NO: 25874 - DNA, 201 bp, Homo sapiens
gaggacttttcttgtatctcctcagggaacagaaggccaagaggaacagccagtgggtacccaccctgcccaacagctcccaccacttagatgccgtgccrtgctccacaaccatcaacaggaaccgcatgggccgagacaagaagagaaccttccccctttggtgtggatgcatcgctgcactcaccctccgtgctgatt

SEQ ID NO: 25875 - DNA, 201 bp, Homo sapiens
gaccctgctgggggcccacatcctgcctctgttcccacccctacacttggctgccctgtagagccttgggaagggcagcgcccaggctgggagctggcccygactcattgccctccccactcctcttccaggcggatgaggcgtcttgccaacacggccccggcctggtaaccagcccatcagcacacggctcccacggag

SEQ ID NO: 25876 - DNA, 201 bp, Homo sapiens
cctttgaactgttgtgtttccctgacttccaggacattgtccatagcctccttggctctgtctgctgtcaccttgccatgtcctcctcacctctctggccsctcaagtggagttactcagggcgcggtccttgggccctttctctgccctcagtttcacatgagtgggccacagccagtctgatggtgcagatgccatcca

SEQ ID NO: 25877 - DNA, 201 bp, Homo sapiens
ctcagcagaagcccgtctttgggttccatatcatctggaaagtcataacacctggctttgctccctgcaatcccccaggaagggcataggctgagttctcwtagtaaagtgttatattccggacacattcagggggtgtctctgaggcactgccaggctctgagcaaagcccggaggtctagaggaggtgaaggcagctga

SEQ ID NO: 25878 - DNA, 201 bp, Homo sapiens
ggctgggtctgaccctgctgggggcccacatcctgcctctgttcccacccctacacttggctgccctgtagagccttgggaagggcagcgcccaggctggragctggccccgactcattgccctccccactcctcttccaggcggatgaggcgtcttgccaacacggccccggcctggtaaccagcccatcagcacacggc

SEQ ID NO: 25879 - DNA, 201 bp, Homo sapiens
acaggagacaagcatgaaggggaaacaggggcatgtgacaaactggtcagaagccctaggctcctagaggacagactgggaccagagtgacacaggcgtcycagagccagtggagtgggatgaagggccagcgaaaggagggagacagggctcaaggggaaggaggctgggctaggcagagcctctgaggagagctgatcc

SEQ ID NO: 25880 - DNA, 201 bp, Homo sapiens
agccagtggagtgggatgaagggccagcgaaaggagggagacagggctcaaggggaaggaggctgggctaggcagagcctctgaggagagctgatcctgcraagttactggcacctcccctgggccagccctgtgttcctggccagggacgggaggagacagtgccctgtctggcagaggaaacagattcatgtgcatgac

SEQ ID NO: 25881 - DNA, 201 bp, Homo sapiens
cttggcctcccaaagtgctgggattacaggcgtgagccaccgcgcccggctgctgtttctcttaacatagaatctagcccagcataggaacttagtgttcmaattggatcagtccatgctctgtctcgttacctttctttgggcaacacatagaaagttctggtttgtttatacccccgccctgttccagaaaggatgcaa

SEQ ID NO: 25882 - DNA, 201 bp, Homo sapiens
tcatcatggagcactgagggtacaccaaggcctcagcagaagcccgtctttgggttccatatcatctggaaagtcataacacctggctttgctccctgcartcccccaggaagggcataggctgagttctcttagtaaagtgttatattccggacacattcagggggtgtctctgaggcactgccaggctctgagcaaagc

SEQ ID NO: 25883 - DNA, 201 bp, Homo sapiens
tgactaaagcaaatgaaaacggagtggttaggaaaaactggataaagaggaaatgttcaagttgaagagggagctcgtactcagcttttatttggtgaacrttgctgggagttgggcgtggctctgggcctttttagaaccaggcagaatgagacgtgaaaatcatttgcatactcagtgtggtcaaggttagcagcagcc

SEQ ID NO: 25884 - DNA, 201 bp, Homo sapiens
aagaccagcctggctaacatggcaaaaccctgtctctactaaaaatacaaaaattagctgggtgtggtggcgggcgcctgtaatcccagctactcgggaaygggaagctgtggcagggataattgcttgaacccgggaggtggaggttgtgttgagctgagatgacaccattgcactccagcctgggcgacagagcaagac

SEQ ID NO: 25885 - DNA, 201 bp, Homo sapiens
aaatatgtgaaacagtatcagatagaaatcagatagaaccaaaaggagaaataaacaaattcacaatcattggagacctcagcattcctctctcaacaacygatggaactggatggaaaatcagcaaaacgatgtaagatcaaaaacactatcgaccaacagaatctgattagcatttatagaacactccagcacagccga

SEQ ID NO: 25886 - DNA, 201 bp, Homo sapiens
tggtgggattacaggtgtgagccactgtgcccagccgggagtgccctttctgtaaagtatcctgacatcaaacttttttgttctctggcccattaataccrcccctgggaatttgtcccaaagaaacattttcaaagaacaaaatgaatcagtaaacccactatatgtacagagattctctgtagcattgtgaataatact

SEQ ID NO: 25887 - DNA, 201 bp, Homo sapiens
gtgacagcatcagatgctggcgaggatgtggaggaactgggtcactcacaagctgctgatgggaatgtaaagtggctggaaaactgccctagaaaacagtktggcaatttctgttaaaaactaaacatgcggccaggcgtggtggctcacacctgtaatcccagcactttgggaggccgaggcgggcggatcacgaggtca

SEQ ID NO: 25888 - DNA, 201 bp, Homo sapiens
ctgaaaggtggcacgcctccaggctggccagtgttacagacgtgtgctttgcagattctttttcccccaagggatgtggtaagaacataaggatggcttgrccttcccagggaagttgcagaaggaaattgtgtacatatggagggcactttaattctgcacatgtcagctgggaatcttttatggggcgataaaacagtt

SEQ ID NO: 25889 - DNA, 201 bp, Homo sapiens
tagtaaagagcatctatttagtacaaaaagtcctgttgctatttttttttttttttttttagacggagtattgctctgttgtctaggctggagtgcagtgscatgatctcagctcactgcaaactctgcctcctggattcacaccattctcctgcctcagcctccctgatagctgggactacaggtgccctgccaccacac

SEQ ID NO: 25890 - DNA, 201 bp, Homo sapiens
tcaggaagagggcacagtatagtaaggaagaccaggatcgtccatgaactccacagtgagtttcactgggctgttcctcctaggagttctaatgtaaaatrtgatgcccactgaaagtaatttagaacaaagtcttaaccagtggagaaccaaaatagtgttgttctgcgaactcttcctcagctctgggtggtatttggc

SEQ ID NO: 25891 - DNA, 201 bp, Homo sapiens
gttgcccaggctggactcaaacacctgagctccagtgatcttcccacctcagcctcccaagtaactgagactacagacatgtaccacctcacctttctcaraacagccttttgaatgtttgtctctcttgtgcctctccttggtagacacacagtctagactttggaataaatgaatgtgttagtgactgaatggcagggg

SEQ ID NO: 25892 - DNA, 201 bp, Homo sapiens
gcaggggacaggcaactccatccatgagcccagggcagggagggcttgctgggtgggagccatgtgcctatggtcctatggggtcctgttgggtggttccmtgggctgtctgctgctgcacgttctttttggacccagcacccacgtggtttgcttggcattagattccagttgggaagggccagtgcctccgattccatt

SEQ ID NO: 25893 - DNA, 201 bp, Homo sapiens
ggaggctgtgggcatgaggaagggcagttgggggcatagaacctggggtgaggatggccagggcaggtgctgatgggggactgcagcaggaaggaccgagrggagaccagggacaggcaggtgcttgagaaggaaggtgggccctgtggatcaggcagggtatctgccccagggggctctgcacaccagcagtcctacacg

SEQ ID NO: 25894 - DNA, 201 bp, Homo sapiens
catgaatctacaattacttaaaaattttaaaatgctctgggcagtgtattcactgggtgtttaccccgtgcacctgaggttcctgctgttgctgccccgcrggctgttaggatgctggtctccagcgtgtctttagggcagggaggagatagtggggctgtggtctgttaggccgacctgcttcttgatgatggaatccta

SEQ ID NO: 25895 - DNA, 201 bp, Homo sapiens
gatatatacccaggagtagaattgctgggtcacgtgacaactcagtggttagcattttgaagaatttctagactgttttccaaagtggctgcaccattttrcattcccaccagaagcgtgcgattcccgtttctctggatcctgctggcatttgctgttctctttttgatcgtagccgtctgaggaggtgtgaagtaattg

SEQ ID NO: 25896 - DNA, 201 bp, Homo sapiens
tggcatttgctgttctctttttgatcgtagccgtctgaggaggtgtgaagtaattgtggttttgatttgcatttttctaatgactgatgatattgagcatstttgcatgtatttctggctgtttgtgtatcttctttggagaaagtgctttgctagtttcttaattgggttttattttattgttgagttgtaattgttctt

SEQ ID NO: 25897 - DNA, 201 bp, Homo sapiens
cacctgccaccacacccagctaattttttgtttttagtagagacggggtttcaccatgttggccaggatggtctccatctcttgacctcataatccgcccrcctcggcctcccaaagtgctgggattacaggtgtgagccactgcacccggcctgtaatttatatattgttttagtttgttgctagtgcttttggtttcat

SEQ ID NO: 25898 - DNA, 201 bp, Homo sapiens
ttgctcccctcgttgtgggcttggtacctttcacgtctgccctccaaggaaggctgctgggagccctcacggtgaggaatgatgtttggggtctgaggctrgggtggtccctagactgctaaaccacccggtgctggccagggaccagctgtcaggagctgctgaggatgggtcagccccagagggtgggggtgccgacat

SEQ ID NO: 25899 - DNA, 201 bp, Homo sapiens
cctgccctgcagttgcctctgctgaggtttagccccgttctccctcctcccctctttcctttcctccttccttccttccatcattcctccttccctccctsccatcctaccccctcctccttttccttctgtcttccttccctctatctcctcttcccatccctagttgactgtccccttctcccttagagtggccacccc

SEQ ID NO: 25900 - DNA, 201 bp, Homo sapiens
caggcctgctgcagggagagccagctgcagccagtgccctgcgctgtgcccacagtccctgagaccccaggctgaggagagcagcactgagcccaacctgraacgggctcacggctactggagctgggtgtgtgctcactggtgtggatgtgcagagccgggactcgctctgcaagcaggctggtcccacaaccttgagca

SEQ ID NO: 25901 - DNA, 201 bp, Homo sapiens
ccttcctccatctcagagacagagagacgctgggcacaaaagccctgttgaaagttcactttgaagggaagcccatggggtcatggcgacaacacttgttmtggaaaggccctggcgcctccagcagctcccttgaggttcaggtgactggagcatccactgggtgccagcagtgctgctgggaggagcagggcacagaca

SEQ ID NO: 25902 - DNA, 201 bp, Homo sapiens
tggcgcaatctcggctcactgcaggctccgccccctggggttcacgccattctcctgcctcagcctcccgagtagctgggactacaggcgcccgccacctygcccggctaattttttgtatttttagtagagacggggtttcaccgtgttagccaggatggtcttgatctcctgacctcgtgatccgcccgcctcggcctc

SEQ ID NO: 25903 - DNA, 201 bp, Homo sapiens
tgggttccatatcatctggaaagtcataacacctggctttgctccctgcaatcccccaggaagggcataggctgagttctcttagtaaagtgttatattcyggacacattcagggggtgtctctgaggcactgccaggctctgagcaaagcccggaggtctagaggaggtgaaggcagctgattggctgggccaggctgag

SEQ ID NO: 25904 - DNA, 201 bp, Homo sapiens
tggaataaatgaatgtgttagtgactgaatggcaggggacaggcaactccatccatgagcccagggcagggagggcttgctgggtgggagccatgtgcctrtggtcctatggggtcctgttgggtggttccatgggctgtctgctgctgcacgttctttttggacccagcacccacgtggtttgcttggcattagattcca

SEQ ID NO: 25905 - DNA, 201 bp, Homo sapiens
tgaacatccatgtgggaaacatttccctggtggaccagtttgagtgggacatgtcagagaaggagaactcaccagagaagtttgccctgaagctgtgctcrgagctggggttgggcggggagtttgtcaccaccatcgcatacagcatccggggacagctgagctggcatcagaagacctacgccttcaggtaggatcatg

SEQ ID NO: 25906 - DNA, 201 bp, Homo sapiens
tgttcagcccaccttcagaatcaggattggccaggcgtggtggctcacgcctgtaatcccagcactttgggagggtgaggtgggaagatcacttgaggccrggagtttgagaccagcctggccatcatggtgaaaccccctctctactaaaaatataaaaattagtcggatgtggtggcacacctgtggtcccagcaacct

SEQ ID NO: 25907 - DNA, 201 bp, Homo sapiens
gtctttgggttccatatcatctggaaagtcataacacctggctttgctccctgcaatcccccaggaagggcataggctgagttctcttagtaaagtgttayattccggacacattcagggggtgtctctgaggcactgccaggctctgagcaaagcccggaggtctagaggaggtgaaggcagctgattggctgggccagg

SEQ ID NO: 25908 - DNA, 201 bp, Homo sapiens
gggcaggatgagggggcaggggctcagcccaggctctaacgtatccagtcagaaaagaggaggtggtcaagatctgtggtttgcaaatacaggctcagctrcctggaaatcacccgtggaagctgcaaagaacacatcttcttgggcccttcctcagaggtgggaagtcactccacctgggtggggctcaggaatgtgctt

SEQ ID NO: 25909 - DNA, 201 bp, Homo sapiens
attggatcagtccatgctctgtctcgttacctttctttgggcaacacatagaaagttctggtttgtttatacccccgccctgttccagaaaggatgcaagsaagcttaccataagtacactgggcccaaatgactaaagcaaatgaaaacggagtggttaggaaaaactggataaagaggaaatgttcaagttgaagaggg

SEQ ID NO: 25910 - DNA, 201 bp, Homo sapiens
ggtctccagcgtgtctttagggcagggaggagatagtggggctgtggtctgttaggccgacctgcttcttgatgatggaatcctactgtctgctctgaggsaatttttcttggctttttcagcttattcctgcaaggcgtcttgtcagtaaggtctgggtggagcagggagagaatgttgactgagaggaccttgctgagg

SEQ ID NO: 25911 - DNA, 201 bp, Homo sapiens
gttaggccgacctgcttcttgatgatggaatcctactgtctgctctgagggaatttttcttggctttttcagcttattcctgcaaggcgtcttgtcagtamggtctgggtggagcagggagagaatgttgactgagaggaccttgctgaggtctggctggccacagatggtccctgtgagctcccatctggtacaattcct

SEQ ID NO: 25912 - DNA, 201 bp, Homo sapiens
aactcaacacctgatgataaaaatgctcagaaaaataatagcaggaaacttcctccatttagtaaagagcatctatttagtacaaaaagtcctgttgctatttttttttttttttttttagacggagtattgctctgttgtctaggctggagtgcagtggcatgatctcagctcactgcaaactctgcctcctggattcac

SEQ ID NO: 25913 - DNA, 201 bp, Homo sapiens
ctgctgctactgcagtcacaggcctggaaatcgctgtggcttggcacagtgtgttttgctcacatgaggcctggtattgggccagcctctgtgccatcacrtctgccaccagttcagcacagaggggagtagagagatggcacgcaagctttgatgtgcctttgctggcctcgcctggatcatctcattagttgggataat

SEQ ID NO: 25914 - DNA, 201 bp, Homo sapiens
tggaagttctagctaatccagtaagctgagaaaaggaaataaaagacgtgtagattggaaaggaagaaataaaatcctatttgcagatgacatgattgtcyatgtagaaaatcccaagggatctacagaaaacttggagaactaataactgaattccccaaggtcacaagatacaagggatacaaggtaaacatgcagaaa

SEQ ID NO: 25915 - DNA, 201 bp, Homo sapiens
gggagtagagagatggcacgcaagctttgatgtgcctttgctggcctcgcctggatcatctcattagttgggataatctcatgcgcccacccagctatgastggaatgaggggagtgtttatggccatgaccacccccagggcatggagcaggaggtctgtgcaggatgagggctgggggcctgctagtcatgtgcttcct

SEQ ID NO: 25916 - DNA, 201 bp, Homo sapiens
agtgttgttctgcgaactcttcctcagctctgggtggtatttggcatttgtaagagctgtgattcttaattggtggttagatgccatgccaaaattgttaytgatttgctttgaaatttcagatcatcttaaaggtgggcatgagagtctttatcacagagggattaaatatgtgaagtagcagtacttgagtagcacgaa

SEQ ID NO: 25917 - DNA, 201 bp, Homo sapiens
atggcacgcaagctttgatgtgcctttgctggcctcgcctggatcatctcattagttgggataatctcatgcgcccacccagctatgagtggaatgagggragtgtttatggccatgaccacccccagggcatggagcaggaggtctgtgcaggatgagggctgggggcctgctagtcatgtgcttcctccttccactccc

SEQ ID NO: 25918 - DNA, 201 bp, Homo sapiens
cttccactcccagtttccaggaaggccacccccagtgccctggttgtcctctcctgcatccggagatgtttggcttcaaagaagaaggggtgagggaggcmggtccatgcccaagcatggtgcaatctcttggcatcccttccctctcctgatttcagagaagttgatgacgcctgagatgttttcagaaatcctctgtga

SEQ ID NO: 25919 - DNA, 201 bp, Homo sapiens
tccagggtggcctagtaacccaataagatgctgccttagtggccatattacaggtgaagaggtgggcacgtggagagctgagatcacctgcggaagttgcmaactggccagttgagaaatggtgaggctggcgattgggcgcaggcctgcaccctgcagagcctatagcataatccttgctgtgctgagccgccactgcca

SEQ ID NO: 25920 - DNA, 201 bp, Homo sapiens
cggaagttgcaaactggccagttgagaaatggtgaggctggcgattgggcgcaggcctgcaccctgcagagcctatagcataatccttgctgtgctgagcygccactgccagactatgccttgagggtgaggggagctttgaaaataggaagatatgagaagtaggtgaaattggcacatgtgatgaccctaaaaaggtca

SEQ ID NO: 25921 - DNA, 201 bp, Homo sapiens
gtgctgcgacccttataatgagccttcttgctttactcataggtgggaaactacctccgtatgttccgaggttctctgtacaagagatacccctcactctrgaggcgactagccactgtggaagagaggaagaaaatagttgcatcgtcacatggtaaaaaaacaaaacctaacactaagggtgcgtcttcacgagggttt

SEQ ID NO: 25922 - DNA, 201 bp, Homo sapiens
gcccgggaggttgaggcttcagtgagccgtgattgagccactgcactccagcctgggcaacagagtgagaccctgtctcaaaaacattttttttaaagttaaaaaaaaaaatcaaatgatagattcaggaagccaagtgaagcccaacatgattaacccaaagcaatccatgccaagacacatcataattaaacttctgga

SEQ ID NO: 25923 - DNA, 201 bp, Homo sapiens
ctcaacacaaagaaaaaaatcttgagagcaatcagagaaaaaggacaacttacctgtagggaaaagacaataagaatggtggtagatttctttttttttcttttttttttttttgagatggagtcttgctctgtcgcccaggctggagtgcagtggcatgatctcggctcactgcaagctccgcctcctgggttcacgcca

SEQ ID NO: 25924 - DNA, 201 bp, Homo sapiens
aaaaaaaaaatagaaaaaatgagccgggcatgttggtacatgcctgtagtttcagctactcaggaagctgaggtgggaggatcgcctgagctcaagaggtsgaggctgcagtgagccaagatcacaccactgcactccagcctgggtgacagagcgagaccctgtctccaaaaaaaaaaaaaaaaatagcgaggttgaact

SEQ ID NO: 25925 - DNA, 201 bp, Homo sapiens
gggaaaagacaataagaatggtggtagatttctttttttttcttttttttttttttgagatggagtcttgctctgtcgcccaggctggagtgcagtggcawgatctcggctcactgcaagctccgcctcctgggttcacgccattctcctgcctcagtctcccgagtagctgggactacaggtgcccaccaccacacccgg

SEQ ID NO: 25926 - DNA, 201 bp, Homo sapiens
gtgcccgccgccatgcccggctaattttttgtattttttagtagagacagggtttcaccgtgttagccaggatggtctcgatctcccgacctcgtgatccrcccacctcggcctcccaaagtgttgggattacaggcgtgagccacggcgcctggccaattttttgtattttttagtagagacggggtttcaccgtgttag

SEQ ID NO: 25927 - DNA, 201 bp, Homo sapiens
gccatgcccggctaattttttgtattttttagtagagacagggtttcaccgtgttagccaggatggtctcgatctcccgacctcgtgatccgcccacctcrgcctcccaaagtgttgggattacaggcgtgagccacggcgcctggccaattttttgtattttttagtagagacggggtttcaccgtgttagccaggatgg

SEQ ID NO: 25928 - DNA, 201 bp, Homo sapiens
cactggagccttcctggccctcagggtgggtgtcatcatggagcactgagggtacaccaaggcctcagcagaagcccgtctttgggttccatatcatctgraaagtcataacacctggctttgctccctgcaatcccccaggaagggcataggctgagttctcttagtaaagtgttatattccggacacattcagggggtg

SEQ ID NO: 25929 - DNA, 201 bp, Homo sapiens
cccacctcaggtgatccacccaccctcggcctcctaaagtgctgggattacaggcgtgagccactgtgctcggccaattttttgtattttttagtagagayggggtttcaccgtgttagccaggatggtctcgatctcctgacctcatgatctgcccgccttggcctcccaaagtgctgggattacagacgtgagccaccg

SEQ ID NO: 25930 - DNA, 201 bp, Homo sapiens
cctccttccactcccagtttccaggaaggccacccccagtgccctggttgtcctctcctgcatccggagatgtttggcttcaaagaagaaggggtgagggrggccggtccatgcccaagcatggtgcaatctcttggcatcccttccctctcctgatttcagagaagttgatgacgcctgagatgttttcagaaatcctct

SEQ ID NO: 25931 - DNA, 201 bp, Homo sapiens
cactgtgctcggccaattttttgtattttttagtagagatggggtttcaccgtgttagccaggatggtctcgatctcctgacctcatgatctgcccgcctyggcctcccaaagtgctgggattacagacgtgagccaccgcgcccagccaaatgatggtagatttctcgtgagaaactggacgctagagcaagtggcagga

SEQ ID NO: 25932 - DNA, 201 bp, Homo sapiens
ctgtccccattagaccgtggccccgggacccctgctagcctcgtctgctgcctcagctgttagctgacaagcggccatcttccccagatgggtttgcagargcctgctgtgcagagagagaggctgaaaatttgcatacctagggctccggccccctcgctgactgttgcttccatttcactttcagctttgatgaccatg

SEQ ID NO: 25933 - DNA, 201 bp, Homo sapiens
acggagtttctgctcttgttgcccaggctggagtgcaatggcacagtctcagctcaccacaacctctacctcccgggttcaagtgattctcctgcctcagyctcctgagtagctgggattacaggcatgtgccaccatacccggttaatttttgtatttttagtagagaggggtttctccatgttggtcaggctggccttg

SEQ ID NO: 25934 - DNA, 201 bp, Homo sapiens
gcccccttcctctgctgtgtccttttggcaagaggaaggtacctcggggcagatttgggtggtccttgtgagacccagggcagagtgtggtccggggatayggcttctgtccagctccctgccagacagctgtctgatcctaagcacagaccagcctctcgggggttttgttcagccaggaggtgggctgaggggcaagtg

SEQ ID NO: 25935 - DNA, 201 bp, Homo sapiens
tcatcactcaataaaaaaaggaatacttaggtataaatccaacaaaacatttacaggacttatataccaaaaactataaaacactgacgaaagtaatgaargaagacctaaataagtagacatatcatattcatggattaaaagactcaagatgatgtcagttttccccaaattgatatacagatttaatgcaatttctgt

SEQ ID NO: 25936 - DNA, 201 bp, Homo sapiens
cccagggcagagtgtggtccggggatatggcttctgtccagctccctgccagacagctgtctgatcctaagcacagaccagcctctcgggggttttgttcrgccaggaggtgggctgaggggcaagtgtgtggaacatgcaggaacaggctgtgcagtggccctcagtagtggggggctggggacttctgggagactcctt

SEQ ID NO: 25937 - DNA, 201 bp, Homo sapiens
caataaaaaaaggaatacttaggtataaatccaacaaaacatttacaggacttatataccaaaaactataaaacactgacgaaagtaatgaaggaagacckaaataagtagacatatcatattcatggattaaaagactcaagatgatgtcagttttccccaaattgatatacagatttaatgcaatttctgtgaaaatcc

SEQ ID NO: 25938 - DNA, 201 bp, Homo sapiens
tactgatttgctttgaaatttcagatcatcttaaaggtgggcatgagagtctttatcacagagggattaaatatgtgaagtagcagtacttgagtagcacraatgaagtgtatgttcagcccaccttcagaatcaggattggccaggcgtggtggctcacgcctgtaatcccagcactttgggagggtgaggtgggaagat

SEQ ID NO: 25939 - DNA, 201 bp, Homo sapiens
agtgagactctatctcaaaaaaaaaaaaaaaaaaaaaggaatcaggatttttctcaggtttctggtaggtgttgtgatgagtttgaggttattttctctgwaaaggacttgaagtagtgcttctctgaatcactggtgatgtatggtgtcacctggcttaacagcctgctgagggagggaagtattaaaatcctccagaaa

SEQ ID NO: 25940 - DNA, 201 bp, Homo sapiens; identical to SEQ ID NO: 20636

SEQ ID NO: 25941 - DNA, 201 bp, Homo sapiens
ggtacactagtgaaactagtgggctttgggtcacggcagctctgtgcagggtgaaagggtgctcttcagacactctgggggctctgtgggagacactcccwtggagacatttgggtgtggacacagcatgtccttgggcaggtggcaaaactgcttcccacgtgacaatggcgccttgtagagagctgccctgggcctggg

SEQ ID NO: 25942 - DNA, 201 bp, Homo sapiens
ttactaagattttggaaaataacgtgggggaatcaccagcaacttcctctgtggtcccccaagtaacaaacaactaaatatcttatcttatttagttagtyaagacagtctcactgtgtcgcccaggctggagtgcagtggcacgatcttgactcattgcaacctccacctcccgggttcaagcaattctcctgtctcagc

SEQ ID NO: 25943 - DNA, 201 bp, Homo sapiens
tcctcacacagcaagtccagtctctccaggttctcccctgggactgcctcagacagccccccactgctctccctggggtctctagcagcccctacctcccytccctgctgccttctcagctctgcagctggtgtggcctctgctccaggcagatcatgtcacctctccacgcagaatcctccaggctccccatcaccctcg

SEQ ID NO: 25944 - DNA, 201 bp, Homo sapiens
ccccaagtaacaaacaactaaatatcttatcttatttagttagtcaagacagtctcactgtgtcgcccaggctggagtgcagtggcacgatcttgactcaytgcaacctccacctcccgggttcaagcaattctcctgtctcagcctcctgagtagctaggattacagttgcccgccactaagccaggctaatttttgtat

SEQ ID NO: 25945 - DNA, 201 bp, Homo sapiens
gtctcactgtgtcgcccaggctggagtgcagtggcacgatcttgactcattgcaacctccacctcccgggttcaagcaattctcctgtctcagcctcctgrgtagctaggattacagttgcccgccactaagccaggctaatttttgtatttttagtagagacagggtttcaccatatttgtcagtctggtctcaaactcc

SEQ ID NO: 25946 - DNA, 201 bp, Homo sapiens
agcaatctcctgcttcagcttcctgagtagctgggattactggcacccaccaccatgcccagctaatttttttggatttttaatagagaccgggtttcacyatgttggccagcctggtctcaaactccgcctcagcctcccaaactcaaatgatctgcccacctcggcctcctaaagtgctgggattataggtgtgagccc

SEQ ID NO: 25947 - DNA, 201 bp, Homo sapiens
gtctcaaaaaaaaaaaaaagaaaaaagagaaaatggagtctcactttgttgtccaggctggtctcgaactcctgggctcaagcaactcttccaccttggcytcccaaactgctgggattacagacatgaaccactgtgcctggccagagctgggtgtttctgtaaggacgtcctttgtcttgatcctggaacatgactgaa

SEQ ID NO: 25948 - DNA, 201 bp, Homo sapiens
ccagagctcagtgcctgacttccataccctcctcggcagtggggacattgattggatccatggtacagtggggcaagctgctggccacaggacatgtgtgygcaaggccactatgcccacacctcaggggaaccagggcagagaacagcctgttccctttggcagtgggacagacaggagacaagcatgaaggggaaacag

SEQ ID NO: 25949 - DNA, 201 bp, Homo sapiens
agggggtgtctctgaggcactgccaggctctgagcaaagcccggaggtctagaggaggtgaaggcagctgattggctgggccaggctgagtgctccagggkggcctagtaacccaataagatgctgccttagtggccatattacaggtgaagaggtgggcacgtggagagctgagatcacctgcggaagttgcaaactggc

SEQ ID NO: 25950 - DNA, 201 bp, Homo sapiens
agtgatcatacttgaaaagtcaacgagacaatagggtaccctcataaaaactttaggtctagatttattttccttaaggaagtcacactttcagtatttgstacaagcaaactgaagccattgtttgagtcagtgatgatttatatagcagtctggtgattgccttgtaaaccttttggaaaattcctttggtatccctgg

SEQ ID NO: 25951 - DNA, 201 bp, Homo sapiens
ctcaagcaactcttccaccttggcctcccaaactgctgggattacagacatgaaccactgtgcctggccagagctgggtgtttctgtaaggacgtcctttktcttgatcctggaacatgactgaaggaaaacaagaatctttggagccatggcacatgaggaccatctctctcctcagaaagagtgccttaggttagagca

SEQ ID NO: 25952 - DNA, 201 bp, Homo sapiens
tgagtcagtgatgatttatatagcagtctggtgattgccttgtaaaccttttggaaaattcctttggtatccctggtttgggttttgttactaaacaaagyaacacaggccatgggggaaattatctggcatctgtctaaaattaaaagacctttttggtgtttattacattgtaaaaatatcaaagtcttgtccttaaga

SEQ ID NO: 25953 - DNA, 201 bp, Homo sapiens
cctttgtcttgatcctggaacatgactgaaggaaaacaagaatctttggagccatggcacatgaggaccatctctctcctcagaaagagtgccttaggttrgagcagcatcttccagatattcttggcaatgctgggaccaaagcccaggcctggctgcccttgccagggcacctggcccaagtcggctttgcccagttcc

SEQ ID NO: 25954 - DNA, 201 bp, Homo sapiens
ttgggttttgttactaaacaaagtaacacaggccatgggggaaattatctggcatctgtctaaaattaaaagacctttttggtgtttattacattgtaaaratatcaaagtcttgtccttaagataaaagaaggtcaaggaggccttgcatttctggaaagtgccagagatccttagtccaaaatcaaaatcaccacgaac

SEQ ID NO: 25955 - DNA, 201 bp, Homo sapiens
ctggctgcccttgccagggcacctggcccaagtcggctttgcccagttccagcaggggttggggggcaggggaggaagctggggacatggtgctgctgcartttgagccatcagaccctgtggcactgtccaggccccgtccggagagtgcatggggtgagatgtgagtcagggctggggaggtgggcaggggcctggccc

SEQ ID NO: 25956 - DNA, 201 bp, Homo sapiens
tgtgcaatccatccccttaatcagggccctgggtggggaggaggagccctgttgcaatctgcactgtgggtagcacaggacagattccttgggcagtccaragtgaggtggagaggcattagtcggtgatcccaagggcatctgactctgagggtggaatcccaggatgaacccatggtctcccccttatcagggatacct

SEQ ID NO: 25957 - DNA, 201 bp, Homo sapiens
caggtgccaactccaagctgatcctgcagcctcttgcactgtacccccaggcccccacccccgctgccccccagcccctgcagatggggccctgcgcctaygagatcaggcagttcctggactgttccaccactcagagtgacctgtccctgtgtgagggcttcagcgaggccctgaagcagtgcaagtactaccatggtg

SEQ ID NO: 25958 - DNA, 201 bp, Homo sapiens
ccagcctggccaacatagtgaaaccccctctctactaaaaatacaaaaaatttgttgggcatggtggcgggcgcctgtagccccagctacttgggaggccraggcaggacaaccacttgaacccgggaggcggaggttgcagtgagccgagactgcgccgctgcactccactctaggtgacagagtgagactctgtctcaa

SEQ ID NO: 25959 - DNA, 201 bp, Homo sapiens
ggtcgtccatctctccgggggtcgtttccaggagctgcagccctccagcctggggtctggccaggattaaccctgcttcctcccacccccgcagccgcccmgccgcgccctctgcccacccgcccgcgcacccaccgccctcggcagccgccccagcccccgccccttcgggccagccggggctcatggctcagatggcga

SEQ ID NO: 25960 - DNA, 201 bp, Homo sapiens
tattttagaccacagcctgttgtgtgcctctctcgatggcctgtcttcagggagctccctggctgatgaggtggggtcaggatggatgtctcactacagtrtgcaatccatccccttaatcagggccctgggtggggaggaggagccctgttgcaatctgcactgtgggtagcacaggacagattccttgggcagtccaga

SEQ ID NO: 25961 - DNA, 201 bp, Homo sapiens
gggagcagggtcccatttccagccgagacccggagctgctggaagggagatgtccggaggacgggagaagggggatagggttgggggcagtgccgcctcccgctgggggcgtgttcctgaggccccgcccggggccccgccttttttgcgccggctgtgacaagcgctgcggcatttgtccccgcgacagcaccgctgccg

SEQ ID NO: 25962 - DNA, 201 bp, Homo sapiens
tgtagctgagccaggaaggtgctagaacttgtgggggtggggctcatactctgagagtacaggcagagtactgggctttcctagagccttctcctccctcycctgcacccgcccaaagtgcccattagaaggcagcagaggccaggcgcagtggctcatgcctgtaatcccagcactttgggaggccaaggcgggtggatc

SEQ ID NO: 25963 - DNA, 201 bp, Homo sapiens
aggtgagcagcgggtccaagagaaactgaggcaggattatctcgaggccacacagggagctgcccaagtgtccagtgaggagtgtccgcgtgtattcaccrttgcttcagcccaggactctgcccgggaagggtcctagtccactggtcttgagttcactgtcacttagaggcaggcttcccggcctctcccttgaggcca

SEQ ID NO: 25964 - DNA, 201 bp, Homo sapiens
ggctcggctgtgggacacgtcatgggcagcgccctgaccggagccttcagcggggggagctcggagccctcccagcctgctgtccagcaggtgagcagcgrgtccaagagaaactgaggcaggattatctcgaggccacacagggagctgcccaagtgtccagtgaggagtgtccgcgtgtattcaccgttgcttcagccc

SEQ ID NO: 25965 - DNA, 201 bp, Homo sapiens
ttccaccactcagagtgacctgtccctgtgtgagggcttcagcgaggccctgaagcagtgcaagtactaccatggtgagtgagtggaccccgactcaggcsgggagggggagaggccaaccctcctcttgcacctgcaggctgaccaccagcctgtgctgcccctcccttcccaggtctgagctccctgccctgaagaggt

SEQ ID NO: 25966 - DNA, 201 bp, Homo sapiens
ctgaaccgcctaaaggaggtgagtttgaaggaagaggtccctagctctgttccccctgagcctcttggggagtgggcaacatggtcccaatgactggggcrgggaggggggaaggatccctaggctgagagtctagcctaggctgagagtctagcctgcacctgacttgctttatgacctcactgggcttcagtgtctcgt

SEQ ID NO: 25967 - DNA, 201 bp, Homo sapiens
tgcctctcttttggcattgttgatgctcttgagagcatcagccgggacattcatgcacaccattatggcagcacatggcagaaagagctatctgcttatgyatgagattgagaggtgaagccagctggacttcctgggtggagtggggacttggagaaattttctgtctagccagaggattataaatgcaccaatcagcgc

SEQ ID NO: 25968 - DNA, 201 bp, Homo sapiens
cagcacatggcagaaagagctatctgcttatgtatgagattgagaggtgaagccagctggacttcctgggtggagtggggacttggagaaattttctgtcyagccagaggattataaatgcaccaatcagcgctctgtgtctagctgaagaattgtaaatgcaccaatcagcactctgtaaaaatgcaccaatcagtgctc

SEQ ID NO: 25969 - DNA, 201 bp, Homo sapiens
attataaatgcaccaatcagcgctctgtgtctagctgaagaattgtaaatgcaccaatcagcactctgtaaaaatgcaccaatcagtgctctgtgtctagmtagaggattgtaaatgcaccaatcagcactctgtaaaatggaccaatcagcactctgtaaaatggaccaatcagcaggatgtgggcggggacaaataagg

SEQ ID NO: 25970 - DNA, 201 bp, Homo sapiens
ggattgtaaatgcaccaatcagcactctgtaaaatggaccaatcagcactctgtaaaatggaccaatcagcaggatgtgggcggggacaaataagggactraaagctggccgccactgccacccttcatccccagccagcagccggcaacctgcttgggtgcccttcggtgctgtggaagctttgtcctttcgctcttccc

SEQ ID NO: 25971 - DNA, 201 bp, Homo sapiens
cttcaccagtgtaactatgcttcatcaccacagttagaaaccagacgacgacattataagaacctggtgtttgcctctcttttggcattgttgatgctctygagagcatcagccgggacattcatgcacaccattatggcagcacatggcagaaagagctatctgcttatgtatgagattgagaggtgaagccagctggac

SEQ ID NO: 25972 - DNA, 201 bp, Homo sapiens
tgaaagctaacactgtcctagtaggtacttttttttttttttttttttgagtcagagtctcattctgtcgcctggctggagtgcagtggcgcgatctcggstcactgcaacctccgcctcccaggttcaagtgattctcctgcgtcagcctcccgagtagctaggattacaggcatgcaccaccacacctgggtaattttt

SEQ ID NO: 25973 - DNA, 201 bp, Homo sapiens
agtgagtccggatcatgccactggacatgagagtgtccagcctggacaatgagagtgaaactccgtctcaaaaaaaaaaaaaaaaaatcagctgggcgtgrtggtgcatgcctgtagtcccagctactcaggaggctgaggtgggaggattgcttgagcctgggaggttcaggctgtgattgagccactgcactccagcct

SEQ ID NO: 25974 - DNA, 201 bp, Homo sapiens
tacaggtgcccgccactatgtgcccagctaaatttttttttttttttttgagacagaattttgctcttgttccccaggctggagtgcagtggcgccatctyggttcactgcaacctccgcctccgggttcaagcaattttcctgcttcagcctcccgagtagctgggattacagacatgagaatcatgcctggctaagttt

SEQ ID NO: 25975 - DNA, 201 bp, Homo sapiens
cccatcctcccccaaccaggaaattcccgttcggagtccctgtcttgctatgtgactttgaccatcacagcccgcctctgagctttttgtcagctctgtcygacaaaagggtgtagaatggttgggtgccggtggtgcacgcctgtaatcccagcactttgggaggccaaggcaggaggattgcttgagcccaggagttca

SEQ ID NO: 25976 - DNA, 201 bp, Homo sapiens
agcaagaccccgtaatctactgaataaacaaacagcgcaaacagggattccctagggttcggttttcctatctctttttttctacaaccaaattggtttaytacaggaatgcaaggtttaacatatgaaaatcagttcacatattttaccacatttaataaaataaaggagaaaaaccacatgatcatctcaatagatgca

SEQ ID NO: 25977 - DNA, 201 bp, Homo sapiens
ctggtgtctctaggcctgagtctccccacctgtatacacagttcccccttctgcccacaagggtccagcatttccttcagaccttgggaactgctgatccrgggataactcacagcccgacccaactcagggataaggaagtatggctttggggatgtgactggaataaacgtgaaggactcctgacctatcccattttat

SEQ ID NO: 25978 - DNA, 201 bp, Homo sapiens
agaatgaaccctgactctagtcacatactgatctaagcctgaattaggctgatcccaacttgagaccttagttctgggcccagatcaagcccttatccttytctaagactgagccttagtcacagactgaattctagccccagcccagactaaccttttagactgactctggcagaagagtcagactaaccttttaaccct

SEQ ID NO: 25979 - DNA, 201 bp, Homo sapiens
ccttgggaactgctgatccggggataactcacagcccgacccaactcagggataaggaagtatggctttggggatgtgactggaataaacgtgaaggactyctgacctatcccattttatccccctccagacctgcgggggatgacagctgaaccgcctaaaggaggtgagtttgaaggaagaggtccctagctctgttcc

SEQ ID NO: 25980 - DNA, 201 bp, Homo sapiens
gctggcaggcacactgtgggtctctggccttgctcttttcccctggtgtctctaggcctgagtctccccacctgtatacacagttcccccttctgcccacragggtccagcatttccttcagaccttgggaactgctgatccggggataactcacagcccgacccaactcagggataaggaagtatggctttggggatgtg

SEQ ID NO: 25981 - DNA, 201 bp, Homo sapiens
cctgactccataaatttaacccagctgatttaagaccctgttgtggcctatcagctgtaaccctccttgcatcttcccacctttgaatagcaaattccttkcctcaccccaggtcagaaagtctgctcagcagtagctgtggatggtaagaagacacgctggtaggtctcagtggctcccagaagccgcaccccctccacc

SEQ ID NO: 25982 - DNA, 201 bp, Homo sapiens
ggaggttgcagtgagctgagatcgtgccactgcactccagcctggctgacagagcaagactctgtctcaaaaaaacaaacaaacaaaaaaacaaaaaaaaatgggccaggcgcagtggctcacacctgttatcccagcactttgggaggctgagacgggcggatcatgagatcaggagatcaagaacatcctggctaacac

SEQ ID NO: 25983 - DNA, 201 bp, Homo sapiens
ctgggagggcttccctgaggaggaagtatacagggcacaaaagagcatttcttctcccaaggcttcactccagggtttcttgttggtaacaagcttcacakgttatgtccccagcacttcattctcaccctctgaggcagatgtcatcctcactccccattctgccactcaggaaatgggctggaggaggaggagtgactt

SEQ ID NO: 25984 - DNA, 201 bp, Homo sapiens
acctgcaaaatggagttcacggggtctttatgaggtaaggaaggaactgataatgaaagctaacactgtcctagtaggtacttttttttttttttttttttgagtcagagtctcattctgtcgcctggctggagtgcagtggcgcgatctcggctcactgcaacctccgcctcccaggttcaagtgattctcctgcgtcag

SEQ ID NO: 25985 - DNA, 201 bp, Homo sapiens
tctgttccccctgagcctcttggggagtgggcaacatggtcccaatgactggggcggggaggggggaaggatccctaggctgagagtctagcctaggctgrgagtctagcctgcacctgacttgctttatgacctcactgggcttcagtgtctcgtctgtacctcgagtagactgaggtcatggtctctgatgctctggtt

SEQ ID NO: 25986 - DNA, 201 bp, Homo sapiens
cagcactctgtaaaatggaccaatcagcaggatgtgggcggggacaaataagggactaaaagctggccgccactgccacccttcatccccagccagcagcyggcaacctgcttgggtgcccttcggtgctgtggaagctttgtcctttcgctcttcccaataaatcttgctgctgctcactctttgggtcctcaccacctt

SEQ ID NO: 25987 - DNA, 201 bp, Homo sapiens
cagtgacgaacttgctgtgtctgtggaagaaagcatgaagaagagaactggcatcctaatctggtgatctggtgatccgttctccttttttttttttttttaattgtaggcattttatctgcaaatgcatattacctccttagaaaaagaattccaggattttacctcctgtgtgttttcgtcttgcttctttgtgatcca

SEQ ID NO: 25988 - DNA, 201 bp, Homo sapiens
atcccagctactcaggaggctaaggcaggagcattgtttgaggccaggagttgaacactagctgggacaacacagaaagaccctgtctctaaaaaaaaaaagaaaaaagaggccaggcacagtggctcatgcctgtaaccccagcattttgggaggcggaggcgggcggatcacttgaggttgagaccagcctaacatggt

SEQ ID NO: 25989 - DNA, 201 bp, Homo sapiens
tttttttttttttgagacggagtctcgctctgtcacccatgctggatggagtgcagtggcgtgatctcggctcactgcaagctccgcctcccgggttcacsccattctcctgcctcagcctcccgagtagctgggactacaggtgcccgccaccacgcctggctaatttttcgtatttttagtagagacgggggggtttca

SEQ ID NO: 25990 - DNA, 201 bp, Homo sapiens
gactgtgccctgaatctggtcacagactgagccctgaacttagtcattgacagagacatgaccctggtcacagactgagcctggctcctggtcacagactraagactaagcccaatcatggactgagccctgtatctagccctaggctacagactactcaactaagggctgacctagaccctgtctgagcctgaccccatc

SEQ ID NO: 25991 - DNA, 201 bp, Homo sapiens
gactcagtgcagacttaacttctctagaaggcacagtaggctcagtgtttagggcccactatacttttagggggtccatgaaagtgtttttttttttttttgagacggagtctcgctctgtcacccatgctggatggagtgcagtggcgtgatctcggctcactgcaagctccgcctcccgggttcacgccattctcctgc

SEQ ID NO: 25992 - DNA, 201 bp, Homo sapiens
ctgtatctagccctaggctacagactactcaactaagggctgacctagaccctgtctgagcctgaccccatcacagactaatccccaaccttggccccacytgaggaagactgctggcctaaattacatgctgccacataagaggcatggattatgggcagagatctgtcttgggagatcttgggcttctcatgctgctga

SEQ ID NO: 25993 - DNA, 201 bp, Homo sapiens
tcatacttccccagcagtgaacagagtgttagagatagcttactgtgtgaatagtctggacaagactaatcatattgactacatactcatattatatatawatatttttttttttttttttttttgagacggagtcttgctctatcacccaggctggagtgcagtggcacaatcttggctcactgcagcctctgcctcccg

SEQ ID NO: 25994 - DNA, 201 bp, Homo sapiens
gcttcaccatattggccaggctgctctcaaactcctgacctcaggtgatccgcccacctcggcctcccaaagtgccgggattacaggcgtgagccacccaygcccagcctgctgcatcatttttaacaattgcatggttttccatcctatggaggtacactcattaatttaactcatcccctgctgtgacatgcttaggtt

SEQ ID NO: 25995 - DNA, 201 bp, Homo sapiens
cacagactgagcctggctcctggtcacagactaaagactaagcccaatcatggactgagccctgtatctagccctaggctacagactactcaactaagggstgacctagaccctgtctgagcctgaccccatcacagactaatccccaaccttggccccacttgaggaagactgctggcctaaattacatgctgccacata

SEQ ID NO: 25996 - DNA, 201 bp, Homo sapiens
cttcaacctgggggcgacagagcgagactccgtctcaaaaaaaaaaaaaagaaagaaagaaagaaaagaaaaatagaaaaaagagagttgtatcactcacygtgaaagtccgtggcttcattcttgaagtcagtgagaccactaacccactggaaggaagaaactccagacacatttgaaggaacaaactctggacacacc

SEQ ID NO: 25997 - DNA, 201 bp, Homo sapiens
tgcccaccaccccgctccttaacaccacctccagtcacaacctggtgatgaaacacctccctggggccgaccctgagctcgtgctgctgggccgccgctasgaggaactagaggtgaggccgtgggaggtgggctgggggcgaggccagaggcgaggcccagcctgctgaccccgcccctcctccgcctcagcgcatccca

SEQ ID NO: 25998 - DNA, 201 bp, Homo sapiens
ctttcccaaggtcacacagctggggctgagctcaggcctctctcctccttctcttcggctccccctcctcctaggcagcccagcacccgctgtcagctgckctgaagtgagtggctatttttattctggtgcgaggggatctcaagcagcagagccatgtaggttagaggctctaggacacccggcctcagcagtccaggg

SEQ ID NO: 25999 - DNA, 201 bp, Homo sapiens
gctgggggcgaggccagaggcgaggcccagcctgctgaccccgcccctcctccgcctcagcgcatcccactcagtgaaatgacccgcgaagagatcaatgmgctagtgcaggagctcggcttctaccgcaaggcggcgcccgacgcgcaggtgccccccgagtacgtgtgggcgcccgcgaagcccccagaggaaacttcg

SEQ ID NO: 26000 - DNA, 201 bp, Homo sapiens
ctttatgaggtaaggaaggaactgataatgaaagctaacactgtcctagtaggtacttttttttttttttttttttgagtcagagtctcattctgtcgcctggctggagtgcagtggcgcgatctcggctcactgcaacctccgcctcccaggttcaagtgattctcctgcgtcagcctcccgagtagctaggattacagg

SEQ ID NO: 26001 - DNA, 201 bp, Homo sapiens
gagtgggcaacatggtcccaatgactggggcggggaggggggaaggatccctaggctgagagtctagcctaggctgagagtctagcctgcacctgacttgytttatgacctcactgggcttcagtgtctcgtctgtacctcgagtagactgaggtcatggtctctgatgctctggttcctccccaggtgaaggctttcgtc

SEQ ID NO: 26002 - DNA, 201 bp, Homo sapiens
attcacatagtttggattatcatttattgcaggtgaccaaaaatcctttcacactgggcgacagttccaatcctggacagacggagagactacaggagttwagccagaagatggaccaggtaagaggtcactggccagtcagtacttagaatcctggggctccagtgaacaggaggctgcatgctcatgtcttgccacttt

SEQ ID NO: 26003 - DNA, 201 bp, Homo sapiens
actgagacagctgcccttgtccgcagtctatcactgctggtattaattgggcaggaggcctctggttggctttctttgcttctgacttaaagcttaaactracctctcatttcacagtctgagacttgcagtgtggaaatcccagagctagaatttgaactgggaatggcagtcctcgggggcaagttcaccacactggaa

SEQ ID NO: 26004 - DNA, 201 bp, Homo sapiens
acaggaaaggagtctcctgaggggagaccgagtccagcacaagtgaaggagttaccattgaaatgatgactttcaaacagcactggcctctgtattgaccytatccttgtttgatatcatgctgttagaattcagcctcctaaagaaaattttcccgtgtatctactgtaatttggggattgcagctggcatttaattcat

SEQ ID NO: 26005 - DNA, 201 bp, Homo sapiens
tggtccaggcggtcggatcttaaataaatccccctatgtctcctagccttagtttcttttgtaaaatggtactggtgttgtcatcagctcaagtgagatamgatttgtgaaaatgctttgtaaatgttgtctgagggtatgaaatgagcagtagttgttatgaatagtattctcaccatttggacagcctggctcacacca

SEQ ID NO: 26006 - DNA, 201 bp, Homo sapiens; identical to SEQ ID NO: 7245

SEQ ID NO: 26007 - DNA, 201 bp, Homo sapiens
ccttattttgttagagcatcttctccagtagcttcctgggaaaaagtgcatgggaaataaaatttctgggaccttccacatctgaacatgtctttattctrttatcacactagagtgattattggctgggaatacgattctaggatagaaataattttttatcagaatttcgaagactgcactatggtcttccagtttggt

SEQ ID NO: 26008 - DNA, 201 bp, Homo sapiens
ggtagaaagtaatggtaataccatagtgtgtttattgtagaattttagcatcactattatcagacatgaatggaaccttgcacctggccttctcattttayagatgaggaaattaagacccagagagttcaagtgaattgcccagggtcatacagggacttgatagcagagctgaggctaagtcacacttgtcttttgttc

SEQ ID NO: 26009 - DNA, 201 bp, Homo sapiens
ctttcagtgttaagggctttgctcagatgtctgataatcattgattgtcttcttacaagtagcgggctaaagacctgagtagggggtgagccttgttgacmtggggcttattacaggggaatttaacttagctgttttgctgaggtggcctccaatgccagaattgttaggtctttcctcttgggctagtcagacaaagag

SEQ ID NO: 26010 - DNA, 201 bp, Homo sapiens
cgctgctctttctgtaggttatttattagtattggatgaaggcgaaggctgggagtgtctttcccaccagcccttgcccatggtggggaggacatctggtytgagtcagagatctgtgcacactttctaaacagcttgtgatgcaagtgtgagcctattgtgttacttgaccttattttggaagttttgaattggcctagg

SEQ ID NO: 26011 - DNA, 201 bp, Homo sapiens
caagcacaccacagaacagaggacaaaataaatctctttcatggaacttgaagtctagtggggaaaaatgacaataaacagatgaggaaaacagtacatcrgatggtgattagtgtcatggaggaatgtaaagcagggaatggggctgggttgtgcaaggaaatggggagtagggaagatcttctgaacaagaaggtgata

SEQ ID NO: 26012 - DNA, 201 bp, Homo sapiens
gtcatttattttactgtaaagttaggggatgagggtccttctagcacctaaaacttcccaacataaaaaacatacatgtatgggttgacttagcccaaatrtttatctccttgatgaattatttcacttgattctctgttgggcattttgtatttgtaaattgtactttttctttgcatttcttctccaaattagtatcag

SEQ ID NO: 26013 - DNA, 201 bp, Homo sapiens
ttggcaatttgggataagttttggcacgttaccagggttgggcactgttcctggccagctcttggtgtttttggtttgggcgactgctgtttagaaggctmtttctttggtagctattaatggccctaactgattggatgtccaagcctacactccaggtctcctgggtaccaagtgaggctcaggtcttctctctgttgc

SEQ ID NO: 26014 - DNA, 201 bp, Homo sapiens
gcttatctactttatgccaagcacaccacagaacagaggacaaaataaatctctttcatggaacttgaagtctagtggggaaaaatgacaataaacagatsaggaaaacagtacatcagatggtgattagtgtcatggaggaatgtaaagcagggaatggggctgggttgtgcaaggaaatggggagtagggaagatcttc

SEQ ID NO: 26015 - DNA, 201 bp, Homo sapiens
aaggagacccacacattggatgcagtggatgaaaggactgcaataaatgcttaaaagtctctttcaaccccaaaagtcttttttttttttttttttaaggkaaattcagagtttattggcaatttgggataagttttggcacgttaccagggttgggcactgttcctggccagctcttggtgtttttggtttgggcgactg

SEQ ID NO: 26016 - DNA, 201 bp, Homo sapiens
cagagaagtggtgaagactgactctgctgccacaaggattcctgagctagattttgaaattcctgcctttagccagaaaggaggtaagtttaagatcagartatttgggctgttcgcatgtagctagaatcttaccctctttcttgcaaaaccccctggtgccaggtctagtggtttgtgtatgggttctaccatgtaatc

SEQ ID NO: 26017 - DNA, 201 bp, Homo sapiens
tcattagttaatcatgagtggaaagcttaggtaaaacagctcgagatggtagaaagtaatggtaataccatagtgtgtttattgtagaattttagcatcaytattatcagacatgaatggaaccttgcacctggccttctcattttacagatgaggaaattaagacccagagagttcaagtgaattgcccagggtcataca

SEQ ID NO: 26018 - DNA, 201 bp, Homo sapiens
gagacctcctcaaggtaacagtctgcttgggaaagtcactgttgtcctcataagttagataaactgtctctatctaggggaagttgtcttttagaaataaygttcagggacatgaggtatctcctacttccctggctttgaggacccctgagcagagggagttaatctaagattggaattgcaggtttagaaggtgaccct

SEQ ID NO: 26019 - DNA, 201 bp, Homo sapiens
gagagggagagacagctgggctgcggtctgatggaaggggacggtctggttattacttgaggagaagctgttctgcagtctctttgtactgaacgtattcytttcttcccaggacatgaacagagaagtggtgaagactgactctgctgccacaaggattcctgagctagattttgaaattcctgcctttagccagaaagg

SEQ ID NO: 26020 - DNA, 201 bp, Homo sapiens
ggcacgttaccagggttgggcactgttcctggccagctcttggtgtttttggtttgggcgactgctgtttagaaggctctttctttggtagctattaatgrccctaactgattggatgtccaagcctacactccaggtctcctgggtaccaagtgaggctcaggtcttctctctgttgctcctgactgttatcgatgcagg

SEQ ID NO: 26021 - DNA, 201 bp, Homo sapiens
gggctgttcgcatgtagctagaatcttaccctctttcttgcaaaaccccctggtgccaggtctagtggtttgtgtatgggttctaccatgtaatcattgtratcttcattagttaatcatgagtggaaagcttaggtaaaacagctcgagatggtagaaagtaatggtaataccatagtgtgtttattgtagaattttagc

SEQ ID NO: 26022 - DNA, 201 bp, Homo sapiens
cactttgtctgtcagggctctggaggtgagaggacctcagagcaggtacctcagtattctagagagagattcggtactggggtcagagctctggtccaggmggtcggatcttaaataaatccccctatgtctcctagccttagtttcttttgtaaaatggtactggtgttgtcatcagctcaagtgagataagatttgtga

SEQ ID NO: 26023 - DNA, 201 bp, Homo sapiens
caggaagaagctgaaattttggatatacaaacacagaccccattgaatgatcaggcaacaaaggctaagtcaacccaggatctaagtgaaggcatctcacrgaaagatggtgatgaggtctgtgaatcaaatgtgagcaatagcataacttctggagagaaagtgatttcagtagaacttggattagataatgggcattct

SEQ ID NO: 26024 - DNA, 201 bp, Homo sapiens
aatgatcaggcaacaaaggctaagtcaacccaggatctaagtgaaggcatctcacggaaagatggtgatgaggtctgtgaatcaaatgtgagcaatagcayaacttctggagagaaagtgatttcagtagaacttggattagataatgggcattctgctattcaaacgggaactctaatccttgaagaaattgaaacgatc

SEQ ID NO: 26025 - DNA, 201 bp, Homo sapiens
ttacaagccatagagaaactgggcatttctatactagagaaaccacctaaaacaactgtatggagtaagatgaaaggtatgaatatgcctggaagaaattktacctagtgtgacatttttgctcatctttttgtcacaaaaggctgctaaggaagagagaatacagttttctagagaataagagtgcagtgtaaaaatgga

SEQ ID NO: 26026 - DNA, 201 bp, Homo sapiens
cagtaacagtaccctagaaagtgcaccaaatggaaaagactatgaaagtacagagattgtagctgaagaaactaagccaaaagatactgaattgagccaaraatcagattttaaagaaaatgggatcactgaagagaaatccaaatcagaagaaagcaaaagaatggagccaattgctattattattacagacactgaaat

SEQ ID NO: 26027 - DNA, 201 bp, Homo sapiens
ctgaagctgctgatgtggcaaggaagtgtccacaagaagcaggagcttctgatcagccagagcccacacggggggcctgggcctcactcaaacgtcttgtmacacgcaggaaaaggtcagagtcttcaaagcagcaaaagccattggagggtgaaatgcaacctgcaataaatgctgaggatgctgatctttctaagaaaa

SEQ ID NO: 26028 - DNA, 201 bp, Homo sapiens
ggagcttctgatcagccagagcccacacggggggcctgggcctcactcaaacgtcttgtaacacgcaggaaaaggtcagagtcttcaaagcagcaaaagcyattggagggtgaaatgcaacctgcaataaatgctgaggatgctgatctttctaagaaaaaggcaaaatctagacttaagattccctgcataaaattccca

SEQ ID NO: 26029 - DNA, 201 bp, Homo sapiens
caggcaacaaaggctaagtcaacccaggatctaagtgaaggcatctcacggaaagatggtgatgaggtctgtgaatcaaatgtgagcaatagcataacttytggagagaaagtgatttcagtagaacttggattagataatgggcattctgctattcaaacgggaactctaatccttgaagaaattgaaacgatcaaggaa

SEQ ID NO: 26030 - DNA, 201 bp, Homo sapiens
gaaagatggtgatgaggtctgtgaatcaaatgtgagcaatagcataacttctggagagaaagtgatttcagtagaacttggattagataatgggcattctsctattcaaacgggaactctaatccttgaagaaattgaaacgatcaaggaaaaacaagatgttcaaccccagcaagcaagcccacttgaaacttcagaaac

SEQ ID NO: 26031 - DNA, 201 bp, Homo sapiens
gtgcctggcctcagtttctttaatagacataggacaattcaggttatccgtttcttcttgagttttgatatttggtatctttcgaggaactgtttcatttgatctaagttgttgaatttaaggaagtggagttggtcacagtattcctttattatctctttaggtctgtggcttcagaagtgatgtgccctctttaatttc

SEQ ID NO: 26032 - DNA, 201 bp, Homo sapiens
cgtgcctggcctcagtttctttaatagacataggacaattcaggttatccgtttcttcttgagttttgatatttggtatctttcgaggaactgtttcattacatctaagttgttgaatttaaggaagtggagttggtcacagtattcctttattatctctttaggtctgtggcttcagaagtgatgtgccctctttaattt

SEQ ID NO: 26033 - DNA, 201 bp, Homo sapiens
ccgtgcctggcctcagtttctttaatagacataggacaattcaggttatccgtttcttcttgagttttgatatttggtatctttcgaggaactgtttcatatcatctaagttgttgaatttaaggaagtggagttggtcacagtattcctttattatctctttaggtctgtggcttcagaagtgatgtgccctctttaatt

SEQ ID NO: 26034 - DNA, 201 bp, Homo sapiens
aaagactctaataataatatctaccttgcaggactgtcaaaagcattttgcgcaataactcagattgggacctggcaaacatttctaactagttttatttrattttatttttattttgagacagaatctccctctgttgcccaggctggagtgcagtggcatgatcttggctcactgcaacctccgcctctcaagttcaag

SEQ ID NO: 26035 - DNA, 201 bp, Homo sapiens
aagaacgaggccagggaatcctgtaacttgccctccagccccgtaattgctgagaggtggagtcattcatttgtggagcgtgatgttgccttggtgttgcrgctgggaggagggaacacatatgagcctgtgagtctttgaaggggagttccaggcactccaggtcccacggagacagggaggttcctggaaatgaagctt

SEQ ID NO: 26036 - DNA, 201 bp, Homo sapiens
ctcgttatgttgcccaggctggtctcaaactcctgggcctgagtgatcctcccaccttggcctcccaaaatgctgggactataggcatgagccaccacacstggcccaggacaactctgttaattgaaccatcgactacccccctcttatcattgagaaggaaccattggattggcaacacagaagtcactggtgacctta

SEQ ID NO: 26037 - DNA, 201 bp, Homo sapiens
aataattaaataatttaaatacttttaaataattgagagattcccagaatctttatttcagcccagtatgtcccatgcatctgtgcattttggtctgtgcytgtgttttgatagtaaaaggagacatgagagtctctctttccagatgagtccagtcctacacaccctccccaggacgccaggggtatctggggctttttc

SEQ ID NO: 26038 - DNA, 201 bp, Homo sapiens
gagtctcactgtgttgcccaggctggaatgcagtggcgcaatctcggctcactgcaacctccacctcccgggttcgagcaattctcctgcctcagcctccyagtagtggggactacaggtgcccaccaccatgcccagctaatttttgtatttttagtagggatgggtctttgccatgttggccaggctgatctccaactc

SEQ ID NO: 26039 - DNA, 201 bp, Homo sapiens
agtagagataggatttcgccatgttggtcaggctggtcttgaactcctgacctcaggtgatccgaccacctcagcctcccaaagtgctgggattacaggastgagccactatggggggccaactttttacttgtaaataaagcctttaagatctttgtgtgccagtatgcgaggattatccttatctcttttaaccactga

SEQ ID NO: 26040 - DNA, 201 bp, Homo sapiens
atacaagttttacagagcttcccaatgaaggatgtataaaggaaaaacatgaggtagctgtagctatggctgtagatatagatagctatagtatagatacygatatagtacagatatatctgtactatagacatggatatgaatatggatgtgatgccttcaataaatggtgagagtttattccagaatagtgcgtataga

SEQ ID NO: 26041 - DNA, 201 bp, Homo sapiens
cagcagagcctgttatctgtctttccagggggctacatggttgcccacttctgctgctacctgcgggcctgctcctgtctctggcttgatttccccagacrgtgggaatgcccagggcccaagcctactcatctcaatctcaggcccacctgggtctgaccaacaacatccctctcctcctctcccagagttgaacaagag

SEQ ID NO: 26042 - DNA, 201 bp, Homo sapiens
ggtacaggcatacaacagaaatacaagttttacagagcttcccaatgaaggatgtataaaggaaaaacatgaggtagctgtagctatggctgtagatatasatagctatagtatagatacggatatagtacagatatatctgtactatagacatggatatgaatatggatgtgatgccttcaataaatggtgagagtttat

SEQ ID NO: 26043 - DNA, 201 bp, Homo sapiens
tttgaggcctaaactggcagcctgccggtcagcttctgcccaaggacaagtttgttttgctactcacaggaacggtctgcctgccttaaaaaaaaaaaaatttaggttcccataataatccatcttttgagcttctctgaaaaactggcagcctcagggactccaggactgtcttctgcagggcaacaactgacgggtggg

SEQ ID NO: 26044 - DNA, 201 bp, Homo sapiens
tgccctgtggggaacattgatacaattgccatacatcactccctggtcttagggcacaagcgggatgttaatgaacaaaaaaagcactctcattggcagcyttattcatcatagtttgctggctgcccaggtctggcctcttgtttcaagtcacagctcgttgaaaacattaaaaaaaaaaaaaacaaaccttgaggctct

SEQ ID NO: 26045 - DNA, 201 bp, Homo sapiens
actcgggaggctgagccaggagaattgcttgagcctgggaggcggaggttgcaatgagccaagatcatgccactacactccagcctgggtgacagccagaktccatctcaaaaaaaaaaaaaaaaaaaaagggacctcacagtgcagtttttttggagggtgattgatcagtatcatcaattgaaaaatgcacgttagaaa

SEQ ID NO: 26046 - DNA, 201 bp, Homo sapiens
tatccccaagtgcccagaaaagagccacaacaaagctcatgcaatccggaggcaggataaaagaggatggatcagacaaaatccccccaaattgaaattgygggtgatggtcattggtgactgtccctgaatggagtcagcaagattctgggggcgtgttccaaagatcgtgatgaataaagccataccctgcaccaggca

SEQ ID NO: 26047 - DNA, 201 bp, Homo sapiens
  misc_feature (1)...(201): n = A,T,C or G, or insertion/deletion polymorphism (see Tables 1-2)
acaagcgggatgttaatgaacaaaaaaagcactctcattggcagcattattcatcatagtttgctggctgcccaggtctggcctcttgtttcaagtcacanctcgttgaaaacattaaaaaaaaaaaaaacaaaccttgaggctctcatttctgtcctttcctcccatcttagcttttgttaatcatgtccccaaagacct

SEQ ID NO: 26048 - DNA, 201 bp, Homo sapiens
gctgtttctttgtcctggaattctctgtcccatctcttcacatgcccgggtcttacttcagcttcagtgagactcctccaaaaggctgtttctttgcaagrtattccactgctccggtttattttctgactgtcattttgttcacttgcttcgtggaatttgacacaatttgaagtggacttgctgctgtgtcatctgtcc

SEQ ID NO: 26049 - DNA, 201 bp, Homo sapiens
atccagagaagcagaggagggggtggcttgaagctggaattccacagacacttgatgggcaggggggagtggtgtagaattatccagagaagcggaggagsgggtggcttgttctctgcctcttttatgcagcagaactttcagaagggaaaaagcgtgggtgttgggaattcctaatggcaagaattcatggaaacgtca

SEQ ID NO: 26050 - DNA, 201 bp, Homo sapiens
cacattcccagggtttctgagcatccttggaatttcagagggaaatatcaatttctcctttgtgttaatttcctaaaaaagaagttatccagcatactgawtggaaccctggagttgttgatctcaaagaaagtgttatctgcatttactgcccctgcggcaagttttagagtttcccattgaaattttggaggtgggctt

SEQ ID NO: 26051 - DNA, 201 bp, Homo sapiens
acgggttgggcctgtggtgtgatttgaacactactggggaatctgtatggggttatggcctgcctgtcctgcagcaaggttgctggaaacttccttggggmcaggtctgcacctcatgcattgggtatcactcccttccctgcttcccttggtgcctagaactcattcgacgtccaatctcaggcaaatgccttcttatct

SEQ ID NO: 26052 - DNA, 201 bp, Homo sapiens
gaagatgaaaagatatgacctacagaaagcatctggcgttgcttgatttggtcacagagggaaaggaaaggactgcctgggattttaaataacatatcacygtgtgttagtacacatttccatctaggcttcccctgttgctaaggaataattaaataatttaaatacttttaaataattgagagattcccagaatcttta

SEQ ID NO: 26053 - DNA, 201 bp, Homo sapiens
cgtgcttggccactggggatgctcaggcgtgcatgtgcccaggtgtggatggaacagcatggggagtggagtggcatggacttgagagtcagggtcctggytttgtttcccacccatcactcacgagcagtttcctaatggctctgagctttggttcgttcttctgtgaaatggggattataatctttcccctcatagggg

SEQ ID NO: 26054 - DNA, 201 bp, Homo sapiens
caggcttgggacttgtcttggtggcccagggctatttcattcaagttggtggactctgattttaattgactcttgtgtgccttgagaccattttccaaggyaaatggatcattaagcctgagtttgtcctcagagaagttccaaatggtctatggctcctgggtacaagcaaggatcatggaaagtcgttttgtgaagtct

SEQ ID NO: 26055 - DNA, 201 bp, Homo sapiens
gtgctggagagggttggattcaaacagatttatgggatggaagggaaaatctaacacaaggaagacgaattcttaaatctgcacctagtgagtgtcactaygtaaaggagaatgcaaggatactgggaagaatgcagaatgatttcggggccaggaggagctactgttaagggagacctcgtgcttggccactggggatgc

SEQ ID NO: 26056 - DNA, 201 bp, Homo sapiens
gaaagtacaatactcgcttgtttacatggtaatgggagttgcattcctgggagaatcatgtggatagaaaccatgcccagaatactttgtgcagaacggawtcagacttggcctcagatacttctaaacatgtgttttacttggggagtatgggggacttggggcaattctcttttccgcaggactgtgatgtgcatggca

SEQ ID NO: 26057 - DNA, 201 bp, Homo sapiens
attccaggttaaacatgttctataaaggaccagataacaaatatcttaggctttgggggctatattgccagcctctcttgccacttctcaattctgccgtrgttgcaagaaagcagccatggatgacacgtaacaaaggtgcagctgtgtgccaataaaactttatttgcaaaatcaggtagtaggccaggtttggcctgt

SEQ ID NO: 26058 - DNA, 201 bp, Homo sapiens
catctcacataaatggaatcgtagtctttgtgactggcttctttacttagcaagtgtgttttttatttgtatttttttaatgtagtaaaatacatgtaacytcaaatttaccatcttaacttggtggttgttactatcattgctcaggctggagggcagtggtgcgatctcagttcgctgcaatctccacctcccaggctc

SEQ ID NO: 26059 - DNA, 201 bp, Homo sapiens
atgtttcatgcataattcatgttactgcttatactggtagtttgttccttattattactaagtcatattccatcttatatctcaaactgctgatttctatrtattgtttccagttattggctattatgagtaaagctgctatgaacattcacggacaagcctttctgtggacatatattttcattctctagtataaatact

SEQ ID NO: 26060 - DNA, 201 bp, Homo sapiens
ctttattattgtcatgtactatttcccaaattctcaggcaagctcagggaaggaggtatcagaattctgccagcctcactggctttgatagatatttgccygtgcctggttgggctgctttgattttgtgtttctgagttcctggtgaggagctggcttgcaggaaacacatcattaagaggagctgtcagaacaaactgc

SEQ ID NO: 26061 - DNA, 201 bp, Homo sapiens
gctggtctcaaactcctgggcctgagtgatcctcccaccttggcctcccaaaatgctgggactataggcatgagccaccacacctggcccaggacaactcrgttaattgaaccatcgactacccccctcttatcattgagaaggaaccattggattggcaacacagaagtcactggtgaccttaactaaggctgtctcctt

SEQ ID NO: 26062 - DNA, 201 bp, Homo sapiens
ctgtctaccttcagagctgtgggatgatgggaggaagaggcgtgagggttgggaggacagggtggagaagaaaggctttgtcagctcaagctttgctctgwcccttgttgtgttggcagcaaaaacaagggtcagacaggcctgaattcaaatcccaccttagctgagtgacttagccattctctgtctcagcttccttat

SEQ ID NO: 26063 - DNA, 201 bp, Homo sapiens
gagattgcgccactccactccagcctgggaaacagagtgagactctgtctcaaaataaataaataaataaataaataaataaataaataaataaataaattgaaaatgctcttgttagagaagttcctgccccacgtggacttctgctgataacagagcatggagctgggttaatggttgtgctgctgtctgagagctggc

SEQ ID NO: 26064 - DNA, 201 bp, Homo sapiens
tgagattgcgccactccactccagcctgggaaacagagtgagactctgtctcaaaataaataaataaataaataaataaataaataaataaataaataaaaagaaaatgctcttgttagagaagttcctgccccacgtggacttctgctgataacagagcatggagctgggttaatggttgtgctgctgtctgagagctgg

SEQ ID NO: 26065 - DNA, 201 bp, Homo sapiens
ctgagattgcgccactccactccagcctgggaaacagagtgagactctgtctcaaaataaataaataaataaataaataaataaataaataaataaataattagaaaatgctcttgttagagaagttcctgccccacgtggacttctgctgataacagagcatggagctgggttaatggttgtgctgctgtctgagagctg

SEQ ID NO: 26066 - DNA, 201 bp, Homo sapiens
aagctgagattgcgccactccactccagcctgggaaacagagtgagactctgtctcaaaataaataaataaataaataaataaataaataaataaataaaaaaatagaaaatgctcttgttagagaagttcctgccccacgtggacttctgctgataacagagcatggagctgggttaatggttgtgctgctgtctgagag

SEQ ID NO: 26067 - DNA, 201 bp, Homo sapiens
aggtgatcctccccactcagcttttcaagtagctaggactacaggcctgcaccaccacgcctggctaatttttgagtgtgtgtgtgtgtgtgtgtgtgtgrgcgcgcgcatatacgtatatgtatgtgtgtatatatatacacacacatatatgtacatatatgtatgtgcatatatataagtataaatgtgtgtgtacat

SEQ ID NO: 26068 - DNA, 201 bp, Homo sapiens
tggcaaggattttttaaatggcaggcaaagctttcagctggaagtgagaatgcagagttgggctggagaggaagaggagcagaaatagcctctaagacctyatttttggttactgtgaagatgaaaagatatgacctacagaaagcatctggcgttgcttgatttggtcacagagggaaaggaaaggactgcctgggattt

SEQ ID NO: 26069 - DNA, 201 bp, Homo sapiens
aattgggcagatcatcatgtggctttcacttttttttttttttttttttaaattgagacagagtcttgctctgtcactctggctggagtgcaacagcacaytcactgctcactgcagcctctgcctccctggactcaggtgatcctccccactcagcttttcaagtagctaggactacaggcctgcaccaccacgcctggc

SEQ ID NO: 26070 - DNA, 201 bp, Homo sapiens
ggctgattgcttgaggccaggagttcgagaccagtctggccaacatgatgaaaccccacctctactaaaaatacaaaaattagctgggcatggtggtgcargcctgtaatcccagctgcttgggaggctgaggcacgagactcacttgagcctgggaggtggaggttgcagttagccgagactgcgccactgcattccagc

SEQ ID NO: 26071 - DNA, 201 bp, Homo sapiens
atacaggaggttgaaagcatgaagtccatggcgtctccaggttgctcaatgaattgggcagatcatcatgtggctttcacttttttttttttttttttttwaattgagacagagtcttgctctgtcactctggctggagtgcaacagcacaatcactgctcactgcagcctctgcctccctggactcaggtgatcctcccc

SEQ ID NO: 26072 - DNA, 201 bp, Homo sapiens
ctggccaacatgatgaaaccccacctctactaaaaatacaaaaattagctgggcatggtggtgcacgcctgtaatcccagctgcttgggaggctgaggcargagactcacttgagcctgggaggtggaggttgcagttagccgagactgcgccactgcattccagcctaggtgtcagagcaagactctgtcaaaaaaataa

SEQ ID NO: 26073 - DNA, 201 bp, Homo sapiens
ttgcagttagccgagactgcgccactgcattccagcctaggtgtcagagcaagactctgtcaaaaaaataaaaaataaaaagaaaagaaaagaaaacaggkaaaaaaatattgccttcatggagttgatatgtgaaggtaggatcatgaccatgaacaattcatattatagtggtaagttctgagaaagataaggctgggt

SEQ ID NO: 26074 - DNA, 201 bp, Homo sapiens
ccaggcagagagaatggcgtttgcaaaggcctcaagcctcaagagctcagggaccgctggggggaaagtgagcagaggagaggatgatttttttttttttacccgacagcaactttccttttcatagccaattatattaagatagaattcacatgccataagattccctcctttaaagtatagaattcaggagttgttagt

SEQ ID NO: 26075 - DNA, 201 bp, Homo sapiens
aactgagaggccaatgcttttgggtgtgaggtcagatggaaggacaaccaggtgacaaggcctccactgagattcctgatacaacatcctgctcatgtctsggggagaaaaagtgctctgcccagaattttgatggaataaggatttcagataaaaaggctttcaaaaggccttggaaatgatttcttagagcaaaaacaa

SEQ ID NO: 26076 - DNA, 201 bp, Homo sapiens
actatgagattcttgtagctgagggctactcctgacacctcctagcagaggcccaggaagtggtcaataaatattacaaagtgattgataggttagtgaakaagtggtttgaaaatctcaaccaaatagtaattgactctccaaaaactcctgggaactcttccgcttaatgttcttgctgacaacctggatgaaggattt

SEQ ID NO: 26077 - DNA, 201 bp, Homo sapiens
gttcagttgcttaggtgtgttaaatgcattttagacttacagtattttcaacttacagtgggtttatcacgatgtaaccccatcctaagtcaaacagcatkggtatttccccagttctgaatactgatatccaatagattgcttttctttctaccaggtcaccagtctcatctcccttgttggagctaatggaaaatggca

SEQ ID NO: 26078 - DNA, 201 bp, Homo sapiens
ggtcctcttttgagggtatgaggctagggagaacagcaaggacaacaggtgtggccagtgctggcttgggtcagcacagaacgggagttgtgccagtccargtatttttacaaacatgctttgactctctcacttgcttgtgccatttacaccctgagaatgtagtattgcatcctgaatataacaaccgcattcaacaaa

SEQ ID NO: 26079 - DNA, 201 bp, Homo sapiens
gacttacagtattttcaacttacagtgggtttatcacgatgtaaccccatcctaagtcaaacagcataggtatttccccagttctgaatactgatatccaytagattgcttttctttctaccaggtcaccagtctcatctcccttgttggagctaatggaaaatggcagtgagaatcaataatatagaaatcacatattgg

SEQ ID NO: 26080 - DNA, 201 bp, Homo sapiens
tggccagcattgagtcacatgaccactcctagctacaaagaaagctgagaaatgcagtctttattcctagtggccatgtgctcagccacaacgcatagctyctaggaatgtgagctctgtcactaagaaagaaagaaaaatggtcgctggtggagaactagcaggttgtttggaaagagtgatgatgctgtggaaaacatt

SEQ ID NO: 26081 - DNA, 201 bp, Homo sapiens
gcttagggcaagactgagttttataaaaagtgagtttattaatgaaaaatttaagtaaataataatctaagtggtacttggctttagcagaaactcagatyggaattgcaacttcagctaacaccttgatttcagcctgggaagccccagagcagaggatccaattaacccttttttcctggacccaagacctgtggaaac

SEQ ID NO: 26082 - DNA, 201 bp, Homo sapiens
ctatattgcacaggccagagctcagtggctattcacagggaccatcacagcacagccttaaaccccgggctcaagcaatcctcctgcttcagtctcctgaygatctgcaattacagacatccaccaccacacctggctggcagaacttttatttaatagcctagtttcttgacttggttctttctaaccatttcaaaaggg

SEQ ID NO: 26083 - DNA, 201 bp, Homo sapiens
acagaatttcaggcccaggcccagccccagccctgctgaaccagaatctccatttcagtaagaactccaggtgattcctgcgtagcaccaatgaggtaaasgactcagtggttcccaaacgccagtgtatgtgcacctgctggggcagagtccttgatgtgagttaaaatgcagattcctgggctcaccttgaggtcccca

SEQ ID NO: 26084 - DNA, 201 bp, Homo sapiens
caaatcagtgtgtttgtgtgtttgccgtggggagaggggaggagagaactaagtccttttctttgccgaaacactagggggaaaaaaaaccccgagcaaarggttttcatattcactgggtgatgtttctacagttgccttcctggcctgatattcttggggaatgttgcttcataaatattgaatggcgtcggtaccttc

SEQ ID NO: 26085 - DNA, 201 bp, Homo sapiens
tgggaggaaagactgctcctctgtgtctggaaggggaaaccactaagtgaagagtctgaaggagtctattttcttttctttagtcttttcagcaaagatakgccacaaatagctggctggagcacttcccagctagacggctggctgataatgggatctggttaaagatacaggaggttgaaagcatgaagtccatggcgt

SEQ ID NO: 26086 - DNA, 201 bp, Homo sapiens
atctgagtaaccttgaagaagccatttttcctttgagaattagtttcttcatctggaagatggggagagtagttgtgatcatagaaatgagataaactatmtaaagagcccagtccagaatttggcacatcgtaggaactccccaaagaatagttattcgtagtctctcaaaaagcaggacctatccagctcctactcctc

SEQ ID NO: 26087 - DNA, 201 bp, Homo sapiens
atggggagagtagttgtgatcatagaaatgagataaactatgtaaagagcccagtccagaatttggcacatcgtaggaactccccaaagaatagttattcytagtctctcaaaaagcaggacctatccagctcctactcctccttcaaaacttacctcaagggtcacctcctccagatggcttccttgatttcttttcccc

SEQ ID NO: 26088 - DNA, 201 bp, Homo sapiens
tctcagcttccttatctataaaatggggataatagcctataattagagcatggttgtgaggattaagtaagctaatccatgtgagttagctcccttgtgtrcttcctactcaaaatgtggtacatagaccagcagcatcagcttcaccctggagcttgtcggaaatgcagaatctcattccttctcagcatctgcatggca

SEQ ID NO: 26089 - DNA, 201 bp, Homo sapiens
ctttgagaagctctgacttctgtctggagtattaagatttcatccactccccacccacccaaacactgaaacagtcaggatcacttcatacatctgttaaratttgtgaataaatagcctttggcaacttagatcttattttttaaatgtacttaagggagtccgtcatttaaagaaaccctatggtgaacacttctgcaa

SEQ ID NO: 26090 - DNA, 201 bp, Homo sapiens
agcccccgagctctgtaagtagctcctgttggcctgtggggatttgcaaggagaatggcaatggatagaaaaggctttgagccagggacagtggttcacgrctgtaatcccagcacttcgggaggtgggtggatcacctgaagtcaggagttcgagaccagcctgaccaacatggtgaaattccgtctctactaaaagtac

SEQ ID NO: 26091 - DNA, 201 bp, Homo sapiens
gttaaaatgcagattcctgggctcaccttgaggtccccactcagtggatctggggctccagggatccgtattggggtgtgatggggttccccgtgtgctcmgaggcacttcctggtctgggaaagtgctggagagggttggattcaaacagatttatgggatggaagggaaaatctaacacaaggaagacgaattcttaaa

SEQ ID NO: 26092 - DNA, 201 bp, Homo sapiens
gtaaattcttacctaaagtgagggaaatattgggcttagtaactgttggttagaacacaagggttataggatcattcccaccacttttccccagtttcacmatcccagggatgggcaaaccttgacaaatttcaattaagatttacagtatacaacttggcagaacttctttatcttttaaagatgggatctcgctatatt

SEQ ID NO: 26093 - DNA, 201 bp, Homo sapiens
aaggtacctgaggctgttagtgtaggatgtagggtcatgaagtccaggtgtggtatgggaaataattgtaaagtgtggtgtgggtacaatcagtgcacacyattttagagacaacacttaaaactttttaaatagtgatatgtttatttgagcatattaaaaaaaggaaaatttgacgatcaaacttggcaatttaatgga

SEQ ID NO: 26094 - DNA, 201 bp, Homo sapiens
ggaatgtctgtgtgctacttctccatctgctcagctggattagagtctccctagaggcccatgttttcagttttgtcgtaatacatctggaacaagagggmtatcagactgtgtctggcgcaggtagttcccacaggcagttgcaggagatcatgatgtatcgacaaagcatcacctctgtcctcagctaactgccttcag

SEQ ID NO: 26095 - DNA, 201 bp, Homo sapiens
ttggttagaacacaagggttataggatcattcccaccacttttccccagtttcacgatcccagggatgggcaaaccttgacaaatttcaattaagatttaragtatacaacttggcagaacttctttatcttttaaagatgggatctcgctatattgcacaggccagagctcagtggctattcacagggaccatcacagca

SEQ ID NO: 26096 - DNA, 201 bp, Homo sapiens
ggagctgtcagaacaaactgctttgtggccccagattgcttgtaggtggcaggtgctgaagccttgggtccaggctctacctgagtgggtaaatgtttacrgagtgccatcggggggtcctgactcaagtcacctctcttctcccacagtcccactgtggggcaggtgttctgtttcaaagaaaaaagggacttgttccgt

SEQ ID NO: 26097 - DNA, 201 bp, Homo sapiens
tcagtgacctcctgtaagggggagtctgtttctggaatattgtcctttcattcttggggggatcaatgtttagtgtctgctggatatttggaggccccagytctcttttgattcatatgtgggactgtgataaggcccaggtactttttgtttctgtagtaattgtgtttctggcattttggattcaagaatccagctatc

SEQ ID NO: 26098 - DNA, 201 bp, Homo sapiens
ggggtgcgaagggtgcagcccaggggtgcgttgattgcagagatagaaataacttcagcaaggaaggtggaagagtgttagacatttccctccctcggtcrgggagaaaaatgctcagccaacgaagtctaagtagtaaaacccaaatccatccatcgtcctaatgccatgcgtgaccctagagacctctactcaagcttg

SEQ ID NO: 26099 - DNA, 201 bp, Homo sapiens
acagagcatggagctgggttaatggttgtgctgctgtctgagagctggcagagatgcacacattcaccttacttgtgccagctacttcccccattcccctyggctttatcagtatttactgcaggggcattcattgatttattcagacatttatggagtgcctgctatgtgccaggatggagctggctacataattagtag

SEQ ID NO: 26100 - DNA, 201 bp, Homo sapiens
atggatgggaaactttcacttcatatttgcttgtttaatttttataattttaattcaatgagcatgtgtcactttttaattttgaaataattatagactcrcaagattgcattgtttttgtaattataaaatgcaaattgggtttaggagaaatgtcgggtggggaatggaaaaggctgtgactctattccagtagaacag

SEQ ID NO: 26101 - DNA, 201 bp, Homo sapiens
aggggcattcattgatttattcagacatttatggagtgcctgctatgtgccaggatggagctggctacataattagtaggggccagtgtgaaatgaaaatytaagactcttgatcaaaaagcaaaaaaaggtatcactaaaggtacgaaaacattgtttctttttctttcatagtctctctttttgtctctcatcatagag

SEQ ID NO: 26102 - DNA, 201 bp, Homo sapiens
tacctgtggtgagtttaatccttttgtattaaaatacaaaaggactcaaatttttggaaagcattcatataattctgggctgggaaaggccatttaaaaayccacaaaatcccaaataatccaagattgtcaaatttgtttacataaaacttcaatttccctatggaaaaaggcatgaggatcaagtcagaagaaaaatcg

SEQ ID NO: 26103 - DNA, 201 bp, Homo sapiens
ctaaaggtacgaaaacattgtttctttttctttcatagtctctctttttgtctctcatcatagagttttttgttatttagtgtccttccaagtaaagaaakaatgtttagcatgaattttactgttcatctttatattatacgcccgttaagaacgcaaatatagaaggagttaactcatatatggaatcattgaaaacac

SEQ ID NO: 26104 - DNA, 201 bp, Homo sapiens
cttcccccagatacctgcatctctccagccccagttccttcacttctcaaggaggtatcctggctctttcatctgaatggcccccactctcccagctactrcccatcccttactctgctttttttccatagcttctatcatcatgtgacctgtagcttctgtatttgttcactgtccagttcccttctctagacgacaagc

SEQ ID NO: 26105 - DNA, 201 bp, Homo sapiens
ttccaaagatcgtgatgaataaagccataccctgcaccaggcaggctttcagtggaattccaaaccctgctttggtcacttgtttaaaaaaaaaaaaaaattgctaagacatggataggggcccagggaggtgtggccaagatgactaaagagattgaaaatggttcctgtggagaagaaaggagtttgaagaagttggag

SEQ ID NO: 26106 - DNA, 201 bp, Homo sapiens
tatgaggctagggagaacagcaaggacaacaggtgtggccagtgctggcttgggtcagcacagaacgggagttgtgccagtccatgtatttttacaaacargctttgactctctcacttgcttgtgccatttacaccctgagaatgtagtattgcatcctgaatataacaaccgcattcaacaaatgttggtcaatgattg

SEQ ID NO: 26107 - DNA, 201 bp, Homo sapiens
atgatctcggctcattgaaacctccgcttcccaggtacaagcgattctcctgccttagcctcctgacgtaactaggattacaggcatgggctatcatgccrggtgaatttttgtatttttattagagatggggtttcaccatgttgttcaggctgatctcgaactcctgacctcaagtgatccacctaccttggcctccca

SEQ ID NO: 26108 - DNA, 201 bp, Homo sapiens
agaggctgctgggatggggagggaacttagaggctcctcgatagtagcacacgtccttgctgcaaccctaaataattgcttttctcccgaggctactgctrgctctgcctggggtaggagccaggcttgggacttgtcttggtggcccagggctatttcattcaagttggtggactctgattttaattgactcttgtgtgc

SEQ ID NO: 26109 - DNA, 201 bp, Homo sapiens
attatttgtcttcattcttttctgttttcaattttattgatttctgcttttctcttcattatttctttccttctgcttcctttgagtttaaatttactttactttctctagtttattgaagtaaaagctttggttactgtttttagctttttcttcttttcaaatataaacattttaatgctgtaaatctccatctaacca

SEQ ID NO: 26110 - DNA, 201 bp, Homo sapiens
tttgtcttcattcttttctgttttcaattttattgatttctgcttttctcttcattatttctttccttctgcttcctttgagtttaaatttacttttcttactctagtttattgaagtaaaagctttggttactgtttttagctttttcttcttttcaaatataaacattttaatgctgtaaatctccatctaaccatggc

SEQ ID NO: 26111 - DNA, 201 bp, Homo sapiens
atttgtcttcattcttttctgttttcaattttattgatttctgcttttctcttcattatttctttccttctgcttcctttgagtttaaatttacttttctatctctagtttattgaagtaaaagctttggttactgtttttagctttttcttcttttcaaatataaacattttaatgctgtaaatctccatctaaccatgg

SEQ ID NO: 26112 - DNA, 201 bp, Homo sapiens
tatttgtcttcattcttttctgttttcaattttattgatttctgcttttctcttcattatttctttccttctgcttcctttgagtttaaatttacttttcattctctagtttattgaagtaaaagctttggttactgtttttagctttttcttcttttcaaatataaacattttaatgctgtaaatctccatctaaccatg

SEQ ID NO: 26113 - DNA, 201 bp, Homo sapiens
ttatttgtcttcattcttttctgttttcaattttattgatttctgcttttctcttcattatttctttccttctgcttcctttgagtttaaatttacttttgtttctctagtttattgaagtaaaagctttggttactgtttttagctttttcttcttttcaaatataaacattttaatgctgtaaatctccatctaaccat

SEQ ID NO: 26114 - DNA, 201 bp, Homo sapiens
gcctggcctcagtttctttaatagacataggacaattcaggttatccgtttcttcttgagttttgatatttggtatctttcgaggaactgtttcatttcaactaagttgttgaatttaaggaagtggagttggtcacagtattcctttattatctctttaggtctgtggcttcagaagtgatgtgccctctttaatttcag

SEQ ID NO: 26115 - DNA, 201 bp, Homo sapiens
gcctttgctgcccctgaaagccatacatcctccataggaattagattctctggacaccaatgtcttcatttgctcactttttttttttttttttttttttaccgagacaggttctcactctgttgtccaggctggaatgcagtggcgccatctcagctcactgcaacctctgcctcttggtctcaagagatgcccccatct

SEQ ID NO: 26116 - DNA, 201 bp, Homo sapiens
tgcctggcctcagtttctttaatagacataggacaattcaggttatccgtttcttcttgagttttgatatttggtatctttcgaggaactgtttcatttcttctaagttgttgaatttaaggaagtggagttggtcacagtattcctttattatctctttaggtctgtggcttcagaagtgatgtgccctctttaatttca

SEQ ID NO: 26117 - DNA, 201 bp, Homo sapiens
actttgagaggctgaggtaggaggatagcatgatactagcctgggcaacatagtaagatcccaggtctacaaaattaaaattaaaaaatgagcaagtgtgmtggtgcatgcctgtagtcccagctactctgggactgaggtgagaggatcgcttgagcccaggagtctgaggttatagtgaactgtgatagcaccactgca

SEQ ID NO: 26118 - DNA, 201 bp, Homo sapiens
aattttatttgtatgtaaaagttttatgttggcataatcttacacgacatctgatgcatgaggtatctatgtgccaaattattataaacaagatttgcacygtagggagcaaagcttgaatgtaggactgtccatagaatacaatctgaacagacacagttctgacagtgggccagatcgagggcaaaattgagccattca

SEQ ID NO: 26119 - DNA, 201 bp, Homo sapiens
ttcagcagatattgactgctctgtcccggttgctgttctagggtttgaaaatatagcagagaatagaagacatgaaaatccgttgcctcatagagcttccyttctaagctggggcagggaatgaaaacaaataacataaatggcggatttcataaattctgaaatgcagccccatcccccattgtaatatctttgaaactg

SEQ ID NO: 26120 - DNA, 201 bp, Homo sapiens
cactctcattggcagcattattcatcatagtttgctggctgcccaggtctggcctcttgtttcaagtcacagctcgttgaaaacattaaaaaaaaaaaaatcaaaccttgaggctctcatttctgtcctttcctcccatcttagcttttgttaatcatgtccccaaagaccttttaaaaaggagaaatggcaaatgatctg

SEQ ID NO: 26121 - DNA, 201 bp, Homo sapiens
ccaggtaaggggttggggaagggggacataaaaattccagaagactgagaggcccaggcaggaaaggttgtgggagtgcaagagaggaagtgtccctctgycctcggacctggagtccaggaacaaacttcctaggaccactttgagggctccgtgacatgatgtctgtaaataacaaaccacatgctaagccagcgcatg

SEQ ID NO: 26122 - DNA, 201 bp, Homo sapiens
agtagtaaaacccaaatccatccatcgtcctaatgccatgcgtgaccctagagacctctactcaagcttgcataatattgtttgagttagaaaagaacatycagtgatactattgcccagatgggctcctgctgagtgtcgagttgaacacacacagctggttaacgacccaagatggaggagaaagatttccttcctggc

SEQ ID NO: 26123 - DNA, 201 bp, Homo sapiens
gcaggcattgtaggggacagaggactgttactgctgataaggaattgacaagacagttgaagggaatcatttattattaaattgaaatttactagtaaaaytattaacaatgtatcaagcagctgttacaaggatagcaggataatacttactgagcacttatcatgtaccaggcagtattttaagcctttgacctgcatt

SEQ ID NO: 26124 - DNA, 201 bp, Homo sapiens
ttttcagaaagcacctcctgggcagggatgtgtcttgttcattgttatacacagagatcttgacacttgtacaacggtttttagaaaatcttgaaaaaaattatttttgaaggaaagatgagatccatagtgaaagagtcaagaaggacttcttggaggaggaggtttttggacagacttgaatgatgagcgctagactga

SEQ ID NO: 26125 - DNA, 201 bp, Homo sapiens
ggactgttactgctgataaggaattgacaagacagttgaagggaatcatttattattaaattgaaatttactagtaaaagtattaacaatgtatcaagcasctgttacaaggatagcaggataatacttactgagcacttatcatgtaccaggcagtattttaagcctttgacctgcattaacccattggttacaacaacc

SEQ ID NO: 26126 - DNA, 201 bp, Homo sapiens
ttaaaaccaaatattccctcatcttccccacctgacttgtgacaagtaagggaggcactggacagagtccctgtgtactgagcagccttccttattgttcrcgcctgttccctcccagctggtgtgtgtgtattgggggtgcgaagggtgcagcccaggggtgcgttgattgcagagatagaaataacttcagcaaggaag

SEQ ID NO: 26127 - DNA, 201 bp, Homo sapiens
tcacctctgtcctcagctaactgccttcagggacccgttcagtgagagaggaagggagcagagagatctcaggtggagagtgtgggttaggcagggccggrgtccctgttcctgggggccaagcctcctgtatagcagatagcacattcccagggtttctgagcatccttggaatttcagagggaaatatcaatttctcct

SEQ ID NO: 26128 - DNA, 201 bp, Homo sapiens
cacctggtcttcactttacctgcctgttccagagagcactggagtctgaattcccttggtggagtatttgacagcagcatggtttttggaggcacatgacktgggtttaagtcccagccttgactgatggtaaccccatgaccctggcccctgtgactgcccctctccagacttcagtttctccagcgataaaatgggagc

SEQ ID NO: 26129 - DNA, 201 bp, Homo sapiens
ttcccaccttctcacgcctgaagggtattttgaagtgcttggagagattgtttggttgaatgggaccaagggacactcctaggaatcaggtgctccatctsaggaatgaaggtcagcagagcctgttatctgtctttccagggggctacatggttgcccacttctgctgctacctgcgggcctgctcctgtctctggcttg

SEQ ID NO: 26130 - DNA, 201 bp, Homo sapiens
gtagagataggatttcgccatgttggtcaggctggtcttgaactcctgacctcaggtgatccgaccacctcagcctcccaaagtgctgggattacaggagwgagccactatggggggccaactttttacttgtaaataaagcctttaagatctttgtgtgccagtatgcgaggattatccttatctcttttaaccactgaa

SEQ ID NO: 26131 - DNA, 21 bp, Homo sapiens
ttccagggtatatctcagagc

SEQ ID NO: 26132 - DNA, 22 bp, Homo sapiens
gttccagggtatatctcagaga

SEQ ID NO: 26133 - DNA, 22 bp, Homo sapiens
ttgaaagagtgtgagcaagatc

SEQ ID NO: 26134 - DNA, 22 bp, Homo sapiens
catccaacagctcttctatcat

SEQ ID NO: 26135 - DNA, 22 bp, Homo sapiens
catccaacagctcttctatcac

SEQ ID NO: 26136 - DNA, 18 bp, Homo sapiens
caaacatccgaggacaag

SEQ ID NO: 26137 - DNA, 19 bp, Homo sapiens
cacctttcagggttgaagt

SEQ ID NO: 26138 - DNA, 18 bp, Homo sapiens
acctttcagggttgaagg

SEQ ID NO: 26139 - DNA, 23 bp, Homo sapiens
gctcctcatctcttctctgtatc

SEQ ID NO: 26140 - DNA, 21 bp, Homo sapiens
tgaggtcacctctagcaagtt

SEQ ID NO: 26141 - DNA, 21 bp, Homo sapiens
tgaggtcacctctagcaagtc

SEQ ID NO: 26142 - DNA, 23 bp, Homo sapiens
tcattgcatgctttcatttataa

SEQ ID NO: 26143 - DNA, 22 bp, Homo sapiens
ggttctgacatgactgtgacag

SEQ ID NO: 26144 - DNA, 21 bp, Homo sapiens
gttctgacatgactgtgacaa

SEQ ID NO: 26145 - DNA, 18 bp, Homo sapiens
ccccaacccaaggtttac

SEQ ID NO: 26146 - DNA, 17 bp, Homo sapiens
gaatggccactggtcac

SEQ ID NO: 26147 - DNA, 17 bp, Homo sapiens
gaatggccactggtcaa

SEQ ID NO: 26148 - DNA, 21 bp, Homo sapiens
acacagggaagaaacactgat

SEQ ID NO: 26149 - DNA, 18 bp, Homo sapiens
gcgtgatgatgaaatcgg

SEQ ID NO: 26150 - DNA, 18 bp, Homo sapiens
gcgtgatgatgaaatcga

SEQ ID NO: 26151 - DNA, 20 bp, Homo sapiens
agcctctcctgactgtcatc

SEQ ID NO: 26152 - DNA, 18 bp, Homo sapiens
gcttcctggcaacacttt

SEQ ID NO: 26153 - DNA, 18 bp, Homo sapiens
gcttcctggcaacacttc

SEQ ID NO: 26154 - DNA, 21 bp, Homo sapiens
cagtcacagcttgcaatcata

SEQ ID NO: 26155 - DNA, 23 bp, Homo sapiens
cagttttccatgggttctactac

SEQ ID NO: 26156 - DNA, 23 bp, Homo sapiens
cagttttccatgggttctactat

SEQ ID NO: 26157 - DNA, 25 bp, Homo sapiens
ttatgaaatggtacagacaagtgat

SEQ ID NO: 26158 - DNA, 23 bp, Homo sapiens
ccagttttggtgtcaactagaaa

SEQ ID NO: 26159 - DNA, 23 bp, Homo sapiens
ccagttttggtgtcaactagaag

SEQ ID NO: 26160 - DNA, 23 bp, Homo sapiens
ttgcaacctgaaaaacataacta

SEQ ID NO: 26161 - DNA, 15 bp, Homo sapiens
actggccccttgcat

SEQ ID NO: 26162 - DNA, 15 bp, Homo sapiens
actggccccttgcag

SEQ ID NO: 26163 - DNA, 19 bp, Homo sapiens
aggagggaaccaaacctta

SEQ ID NO: 26164 - DNA, 18 bp, Homo sapiens
acacccaccctaccacaa

SEQ ID NO: 26165 - DNA, 18 bp, Homo sapiens
acacccaccctaccacag

SEQ ID NO: 26166 - DNA, 24 bp, Homo sapiens
tgttaaacaggaggaaagacaata

SEQ ID NO: 26167 - DNA, 17 bp, Homo sapiens
gggatggaagagcttca

SEQ ID NO: 26168 - DNA, 17 bp, Homo sapiens
gggatggaagagcttcg

SEQ ID NO: 26169 - DNA, 18 bp, Homo sapiens
ctgcagccttcctctgac

SEQ ID NO: 26170 - DNA, 18 bp, Homo sapiens
ccaggtgatccaggagag

SEQ ID NO: 26171 - DNA, 18 bp, Homo sapiens
ccaggtgatccaggagac

SEQ ID NO: 26172 - DNA, 18 bp, Homo sapiens
tccatggcgaaaattttg

SEQ ID NO: 26173 - DNA, 17 bp, Homo sapiens
tgtcggtaaacatggca

SEQ ID NO: 26174 - DNA, 16 bp, Homo sapiens
gtcggtaaacatggcg

SEQ ID NO: 26175 - DNA, 19 bp, Homo sapiens
ggtgggtggtctgactctc

SEQ ID NO: 26176 - DNA, 18 bp, Homo sapiens
agatggagctgctcatca

SEQ ID NO: 26177 - DNA, 17 bp, Homo sapiens
gatggagctgctcatcg

SEQ ID NO: 26178 - DNA, 23 bp, Homo sapiens
gttaggaaggtgatccaagatac

SEQ ID NO: 26179 - DNA, 15 bp, Homo sapiens
gctgccctcagtccg

SEQ ID NO: 26180 - DNA, 16 bp, Homo sapiens
tgctgccctcagtcca

SEQ ID NO: 26181 - DNA, 19 bp, Homo sapiens
gggcactgccaattcttag

SEQ ID NO: 26182 - DNA, 22 bp, Homo sapiens
caagaggatttttatggaatgg

SEQ ID NO: 26183 - DNA, 23 bp, Homo sapiens
acaagaggatttttatggaatga

SEQ ID NO: 26184 - DNA, 21 bp, Homo sapiens
ggtggtgaggctttgagtata

SEQ ID NO: 26185 - DNA, 17 bp, Homo sapiens
ctgaggcctatgtcctc

SEQ ID NO: 26186 - DNA, 17 bp, Homo sapiens
ctgaggcctatgtcctt

SEQ ID NO: 26187 - DNA, 21 bp, Homo sapiens
agctctcctttgttgctactg

SEQ ID NO: 26188 - DNA, 15 bp, Homo sapiens
cccccactctccagc

SEQ ID NO: 26189 - DNA, 15 bp, Homo sapiens
cccccactctccagg

SEQ ID NO: 26190 - DNA, 19 bp, Homo sapiens
ggcaaaagcactgtgaaga

SEQ ID NO: 26191 - DNA, 17 bp, Homo sapiens
cggagcctccagaaatg

SEQ ID NO: 26192 - DNA, 19 bp, Homo sapiens
aacggagcctccagaaata

SEQ ID NO: 26193 - DNA, 17 bp, Homo sapiens
gcagcaggctccacagt

SEQ ID NO: 26194 - DNA, 17 bp, Homo sapiens
gcctctcaccttgaacg

SEQ ID NO: 26195 - DNA, 18 bp, Homo sapiens
ggcctctcaccttgaaca

SEQ ID NO: 26196 - DNA, 20 bp, Homo sapiens
cacttggtcccagcactact

SEQ ID NO: 26197 - DNA, 24 bp, Homo sapiens
cacagacttgatgtttttgaaagt

SEQ ID NO: 26198 - DNA, 22 bp, Homo sapiens
cagacttgatgtttttgaaagc

SEQ ID NO: 26199 - DNA, 19 bp, Homo sapiens
tgcaaaggaagcaacttca

SEQ ID NO: 26200 - DNA, 20 bp, Homo sapiens
aggttcactgtttctccaat

SEQ ID NO: 26201 - DNA, 20 bp, Homo sapiens
aggttcactgtttctccaac

SEQ ID NO: 26202 - DNA, 21 bp, Homo sapiens
gagcacatccttccattgtaa

SEQ ID NO: 26203 - DNA, 21 bp, Homo sapiens
aattcaagacagtgcaacatc

SEQ ID NO: 26204 - DNA, 23 bp, Homo sapiens
taaattcaagacagtgcaacata

SEQ ID NO: 26205 - DNA, 22 bp, Homo sapiens
cacacaccgcactctaattact

SEQ ID NO: 26206 - DNA, 24 bp, Homo sapiens
cttacagaaggacatcctttacag

SEQ ID NO: 26207 - DNA, 24 bp, Homo sapiens
cttacagaaggacatcctttacac

SEQ ID NO: 26208 - DNA, 17 bp, Homo sapiens
gcaggcccaagattgat

SEQ ID NO: 26209 - DNA, 16 bp, Homo sapiens
cacggcgcactttctt

SEQ ID NO: 26210 - DNA, 16 bp, Homo sapiens
cacggcgcactttctc

SEQ ID NO: 26211 - DNA, 26 bp, Homo sapiens
tgttttttcctttgtcatcttatcta

SEQ ID NO: 26212 - DNA, 17 bp, Homo sapiens
agtggagcttcagggct

SEQ ID NO: 26213 - DNA, 15 bp, Homo sapiens
tggagcttcagggcg

SEQ ID NO: 26214 - DNA, 23 bp, Homo sapiens
cagtggagacagaggatgtttac

SEQ ID NO: 26215 - DNA, 18 bp, Homo sapiens
cagcattcccatcacatt

SEQ ID NO: 26216 - DNA, 18 bp, Homo sapiens
cagcattcccatcacatc

SEQ ID NO: 26217 - DNA, 26 bp, Homo sapiens
ttttgcttttgtgattctattactta

SEQ ID NO: 26218 - DNA, 17 bp, Homo sapiens
cagctgctgctgtccat

SEQ ID NO: 26219 - DNA, 17 bp, Homo sapiens
cagctgctgctgtccac

SEQ ID NO: 26220 - DNA, 22 bp, Homo sapiens
catgaacctgtcaatcttctca

SEQ ID NO: 26221 - DNA, 25 bp, Homo sapiens
cagatatggactccagtcatagtac

SEQ ID NO: 26222 - DNA, 25 bp, Homo sapiens
cagatatggactccagtcatagtat

SEQ ID NO: 26223 - DNA, 19 bp, Homo sapiens
tggctgagcatcgttattc

SEQ ID NO: 26224 - DNA, 20 bp, Homo sapiens
tgtcgaatgggagtcttctt

SEQ ID NO: 26225 - DNA, 20 bp, Homo sapiens
tgtcgaatgggagtcttctc

SEQ ID NO: 26226 - DNA, 20 bp, Homo sapiens
ggaagaaacagctacccaga

SEQ ID NO: 26227 - DNA, 15 bp, Homo sapiens
tcctgcctaggacgc

SEQ ID NO: 26228 - DNA, 16 bp, Homo sapiens
ctcctgcctaggacgt

SEQ ID NO: 26229 - DNA, 19 bp, Homo sapiens
gcactcagcccatcagatg

SEQ ID NO: 26230 - DNA, 17 bp, Homo sapiens
catcacggagatccacc

SEQ ID NO: 26231 - DNA, 19 bp, Homo sapiens
atcatcacggagatccact

SEQ ID NO: 26232 - DNA, 22 bp, Homo sapiens
tcagctccaaggagattcttag

SEQ ID NO: 26233 - DNA, 17 bp, Homo sapiens
tgtcggtaaacatggca

SEQ ID NO: 26234 - DNA, 16 bp, Homo sapiens
gtcggtaaacatggcg

SEQ ID NO: 26235 - DNA, 19 bp, Homo sapiens
ggtgggtggtctgactctc

SEQ ID NO: 26236 - DNA, 25 bp, Homo sapiens
tagacaacgggaagattatagagta

SEQ ID NO: 26237 - DNA, 22 bp, Homo sapiens
acaacgggaagattatagagtg

SEQ ID NO: 26238 - DNA, 21 bp, Homo sapiens
ttttgtgctgttcacattctc

SEQ ID NO: 26239 - DNA, 16 bp, Homo sapiens
actcctttggactggc

SEQ ID NO: 26240 - DNA, 18 bp, Homo sapiens
tgactcctttggactggt

SEQ ID NO: 26241 - DNA, 22 bp, Homo sapiens
tcttaaatgctgtggaattgtg

SEQ ID NO: 26242 - DNA, 22 bp, Homo sapiens
gacctacgctccttcatctaac

SEQ ID NO: 26243 - DNA, 22 bp, Homo sapiens
gacctacgctccttcatctaat

SEQ ID NO: 26244 - DNA, 29 bp, Homo sapiens
caatgtgattacctcaaaataatatctac

SEQ ID NO: 26245 - DNA, 18 bp, Homo sapiens
ccctacagaggatgtcag

SEQ ID NO: 26246 - DNA, 18 bp, Homo sapiens
ccctacagaggatgtcaa

SEQ ID NO: 26247 - DNA, 18 bp, Homo sapiens
cagagcctcccttgtcac

SEQ ID NO: 26248 - DNA, 24 bp, Homo sapiens
cttacagaaggacatcctttacag

SEQ ID NO: 26249 - DNA, 24 bp, Homo sapiens
cttacagaaggacatcctttacac

SEQ ID NO: 26250 - DNA, 17 bp, Homo sapiens
gcaggcccaagattgat

SEQ ID NO: 26251 - DNA, 17 bp, Homo sapiens
gcccccctctctgaaga

SEQ ID NO: 26252 - DNA, 16 bp, Homo sapiens
cccccctctctgaagg

SEQ ID NO: 26253 - DNA, 22 bp, Homo sapiens
ccagttcgtggtatgttcatct

SEQ ID NO: 26254 - DNA, 14 bp, Homo sapiens
gccaatgtggcggg

SEQ ID NO: 26255 - DNA, 14 bp, Homo sapiens
gccaatgtggcgga

SEQ ID NO: 26256 - DNA, 17 bp, Homo sapiens
cctggacgacggtttca

SEQ ID NO: 26257 - DNA, 15 bp, Homo sapiens
tgggctccatcccac

SEQ ID NO: 26258 - DNA, 15 bp, Homo sapiens
tgggctccatcccat

SEQ ID NO: 26259 - DNA, 24 bp, Homo sapiens
ccaattctttttcttctttcagtt

SEQ ID NO: 26260 - DNA, 21 bp, Homo sapiens
tttgtacaggaagttgtgagg

SEQ ID NO: 26261 - DNA, 23 bp, Homo sapiens
tgtttgtacaggaagttgtgagt

SEQ ID NO: 26262 - DNA, 18 bp, Homo sapiens
ggctgtctcggcttcttt

SEQ ID NO: 26263 - DNA, 16 bp, Homo sapiens
cggatcaggaaggctt

SEQ ID NO: 26264 - DNA, 16 bp, Homo sapiens
cggatcaggaaggctc

SEQ ID NO: 26265 - DNA, 22 bp, Homo sapiens
atccacagacaggcaatctata

SEQ ID NO: 26266 - DNA, 24 bp, Homo sapiens
actagagatggatgaacttttctc

SEQ ID NO: 26267 - DNA, 24 bp, Homo sapiens
actagagatggatgaacttttctt

SEQ ID NO: 26268 - DNA, 23 bp, Homo sapiens
gttctccagaaagcattctttat

SEQ ID NO: 26269 - DNA, 20 bp, Homo sapiens
caaatacatctcccaggatc

SEQ ID NO: 26270 - DNA, 20 bp, Homo sapiens
caaatacatctcccaggatt

SEQ ID NO: 26271 - DNA, 25 bp, Homo sapiens
gttttaattgcagtttgaatgatat

SEQ ID NO: 26272 - DNA, 18 bp, Homo sapiens
tccaaaaggacctgacat

SEQ ID NO: 26273 - DNA, 18 bp, Homo sapiens
tccaaaaggacctgacac

SEQ ID NO: 26274 - DNA, 18 bp, Homo sapiens
ggctgcagaatggaattt

SEQ ID NO: 26275 - DNA, 19 bp, Homo sapiens
tggttggtgtcaatcctct

SEQ ID NO: 26276 - DNA, 18 bp, Homo sapiens
ggttggtgtcaatcctca

SEQ ID NO: 26277 - DNA, 20 bp, Homo sapiens
ccaggtccccaatctactct

SEQ ID NO: 26278 - DNA, 13 bp, Homo sapiens
gctgggccgtctg

SEQ ID NO: 26279 - DNA, 14 bp, Homo sapiens
agctgggccgtcta

SEQ ID NO: 26280 - DNA, 17 bp, Homo sapiens
caccgctcatggacaca

SEQ ID NO: 26281 - DNA, 18 bp, Homo sapiens
gaagtcattctgctctgc

SEQ ID NO: 26282 - DNA, 20 bp, Homo sapiens
atgaagtcattctgctctgt

SEQ ID NO: 26283 - DNA, 25 bp, Homo sapiens
tttccatctcctaactcttttctag

SEQ ID NO: 26284 - DNA, 17 bp, Homo sapiens
agggaaaccccagagag

SEQ ID NO: 26285 - DNA, 17 bp, Homo sapiens
agggaaaccccagagaa

SEQ ID NO: 26286 - DNA, 22 bp, Homo sapiens
acaagttcatttgtgaatgtga

SEQ ID NO: 26287 - DNA, 21 bp, Homo sapiens
tcaatgtcgtattcaccttct

SEQ ID NO: 26288 - DNA, 19 bp, Homo sapiens
aatgtcgtattcaccttcc

SEQ ID NO: 26289 - DNA, 24 bp, Homo sapiens
actccaggatttttcaaagattat

SEQ ID NO: 26290 - DNA, 18 bp, Homo sapiens
ctgttgtcctgcttccaa

SEQ ID NO: 26291 - DNA, 18 bp, Homo sapiens
ctgttgtcctgcttccag

SEQ ID NO: 26292 - DNA, 22 bp, Homo sapiens
gtttctgcatcagtgagatttt

SEQ ID NO: 26293 - DNA, 17 bp, Homo sapiens
caccctgcagatggaac

SEQ ID NO: 26294 - DNA, 17 bp, Homo sapiens
caccctgcagatggaag

SEQ ID NO: 26295 - DNA, 24 bp, Homo sapiens
caagactccttcatcctcaatagt

SEQ ID NO: 26296 - DNA, 18 bp, Homo sapiens
gcaccttgctgctgtctg

SEQ ID NO: 26297 - DNA, 18 bp, Homo sapiens
gcaccttgctgctgtctc

SEQ ID NO: 26298 - DNA, 19 bp, Homo sapiens
gccctgatcactgcaaaac

SEQ ID NO: 26299 - DNA, 18 bp, Homo sapiens
cctctccacagcgttttg

SEQ ID NO: 26300 - DNA, 18 bp, Homo sapiens
cctctccacagcgttttc

SEQ ID NO: 26301 - DNA, 15 bp, Homo sapiens
gcagcggccacagag

SEQ ID NO: 26302 - DNA, 15 bp, Homo sapiens
cccccacagaaagcg

SEQ ID NO: 26303 - DNA, 15 bp, Homo sapiens
cccccacagaaagcc

SEQ ID NO: 26304 - DNA, 24 bp, Homo sapiens
tctaaaatcccatcacaaacttta

SEQ ID NO: 26305 - DNA, 20 bp, Homo sapiens
agacaagattgaacggatca

SEQ ID NO: 26306 - DNA, 19 bp, Homo sapiens
gacaagattgaacggatcg

SEQ ID NO: 26307 - DNA, 22 bp, Homo sapiens
tgaaatcctcaaacacagacac

SEQ ID NO: 26308 - DNA, 25 bp, Homo sapiens
aagaatttgaacttactgatgagac

SEQ ID NO: 26309 - DNA, 26 bp, Homo sapiens
taagaatttgaacttactgatgagat

SEQ ID NO: 26310 - DNA, 24 bp, Homo sapiens
atgtggagtttgatttccttatta

SEQ ID NO: 26311 - DNA, 23 bp, Homo sapiens
gtatgacctgtacttctggagac

SEQ ID NO: 26312 - DNA, 23 bp, Homo sapiens
gtatgacctgtacttctggagaa

SEQ ID NO: 26313 - DNA, 18 bp, Homo sapiens
aggccccctctcaatact

SEQ ID NO: 26314 - DNA, 19 bp, Homo sapiens
tgcgaatcccactctactt

SEQ ID NO: 26315 - DNA, 19 bp, Homo sapiens
tgcgaatcccactctactc

SEQ ID NO: 26316 - DNA, 21 bp, Homo sapiens
caagggaaaagtgtcaatcag

SEQ ID NO: 26317 - DNA, 22 bp, Homo sapiens
acaatcacaagctatttgttca

SEQ ID NO: 26318 - DNA, 21 bp, Homo sapiens
caatcacaagctatttgttcg

SEQ ID NO: 26319 - DNA, 25 bp, Homo sapiens
aacttttggttttgtttgttactct

SEQ ID NO: 26320 - DNA, 14 bp, Homo sapiens
gagccggagcctct

SEQ ID NO: 26321 - DNA, 13 bp, Homo sapiens
agccggagcctcc

SEQ ID NO: 26322 - DNA, 20 bp, Homo sapiens
gcatgccttcctcactagac

SEQ ID NO: 26323 - DNA, 22 bp, Homo sapiens
ccagcaaactatgatgaataat

SEQ ID NO: 26324 - DNA, 22 bp, Homo sapiens
ccagcaaactatgatgaataac

SEQ ID NO: 26325 - DNA, 22 bp, Homo sapiens
tgggatgactctagccacttac

SEQ ID NO: 26326 - DNA, 17 bp, Homo sapiens
gatgctgggtggatgtt

SEQ ID NO: 26327 - DNA, 17 bp, Homo sapiens
gatgctgggtggatgtc

SEQ ID NO: 26328 - DNA, 19 bp, Homo sapiens
tgtggccctgagaatgtac

SEQ ID NO: 26329 - DNA, 19 bp, Homo sapiens
caaagccatggtctttcat

SEQ ID NO: 26330 - DNA, 19 bp, Homo sapiens
caaagccatggtctttcac

SEQ ID NO: 26331 - DNA, 19 bp, Homo sapiens
ccgctcttcggttctactc

SEQ ID NO: 26332 - DNA, 30 bp, Homo sapiens
cccggctgggcgcggacatggaggacgttc

SEQ ID NO: 26333 - DNA, 30 bp, Homo sapiens
cccggctgggcgcggacatggaggacgttt

SEQ ID NO: 26334 - DNA, 15 bp, Homo sapiens
cagcttgcgcaggtg

SEQ ID NO: 26335 - DNA, 18 bp, Homo sapiens
ctggaaatggttatgggc

SEQ ID NO: 26336 - DNA, 20 bp, Homo sapiens
tactggaaatggttatggga

SEQ ID NO: 26337 - DNA, 24 bp, Homo sapiens
tttataggcgtgaaactaattctc

SEQ ID NO: 26338 - DNA, 20 bp, Homo sapiens
tcatgcagtctctcctgaag

SEQ ID NO: 26339 - DNA, 20 bp, Homo sapiens
tcatgcagtctctcctgaaa

SEQ ID NO: 26340 - DNA, 23 bp, Homo sapiens
tctgccttatcacttgtacactg

SEQ ID NO: 26341 - DNA, 20 bp, Homo sapiens
gccatacacctctttcagga

SEQ ID NO: 26342 - DNA, 19 bp, Homo sapiens
ccatacacctctttcaggg

SEQ ID NO: 26343 - DNA, 20 bp, Homo sapiens
ccaggaggcatgttgataag

SEQ ID NO: 26344 - DNA, 18 bp, Homo sapiens
gtaacactggggacaacg

SEQ ID NO: 26345 - DNA, 20 bp, Homo sapiens
gtgtaacactggggacaact

SEQ ID NO: 26346 - DNA, 22 bp, Homo sapiens
accaaggagaacaagacacata

SEQ ID NO: 26347 - DNA, 22 bp, Homo sapiens
agacaaattctctcatgtccac

SEQ ID NO: 26348 - DNA, 22 bp, Homo sapiens
agacaaattctctcatgtccat

SEQ ID NO: 26349 - DNA, 24 bp, Homo sapiens
tgtttttccaggaaaaagatattc

SEQ ID NO: 26350 - DNA, 15 bp, Homo sapiens
cggctttctggtggg

SEQ ID NO: 26351 - DNA, 16 bp, Homo sapiens
acggctttctggtgga

SEQ ID NO: 26352 - DNA, 16 bp, Homo sapiens
ggctccgaggacgaga

SEQ ID NO: 26353 - DNA, 19 bp, Homo sapiens
ccctcagtgtgactgagat

SEQ ID NO: 26354 - DNA, 19 bp, Homo sapiens
ccctcagtgtgactgagac

SEQ ID NO: 26355 - DNA, 19 bp, Homo sapiens
ccaggcatttcccatacag

SEQ ID NO: 26356 - DNA, 17 bp, Homo sapiens
ccaagctgaaaggcaag

SEQ ID NO: 26357 - DNA, 17 bp, Homo sapiens
ccaagctgaaaggcaat

SEQ ID NO: 26358 - DNA, 17 bp, Homo sapiens
cagccagggtggagagt

SEQ ID NO: 26359 - DNA, 17 bp, Homo sapiens
tgcccagggctctgata

SEQ ID NO: 26360 - DNA, 16 bp, Homo sapiens
gcccagggctctgatg

SEQ ID NO: 26361 - DNA, 19 bp, Homo sapiens
ccatcgcatgctcaataca

SEQ ID NO: 26362 - DNA, 15 bp, Homo sapiens
gccttggggcacatg

SEQ ID NO: 26363 - DNA, 15 bp, Homo sapiens
gccttggggcacatc

SEQ ID NO: 26364 - DNA, 24 bp, Homo sapiens
ggaatttatggcagttttaaacat

SEQ ID NO: 26365 - DNA, 22 bp, Homo sapiens
gcagtcctgaacaaagtagatg

SEQ ID NO: 26366 - DNA, 23 bp, Homo sapiens
cgcagtcctgaacaaagtagata

SEQ ID NO: 26367 - DNA, 22 bp, Homo sapiens
cgtgcatgttttgaaaaatgta

SEQ ID NO: 26368 - DNA, 21 bp, Homo sapiens
gacatcaaacaagctctttct

SEQ ID NO: 26369 - DNA, 20 bp, Homo sapiens
acatcaaacaagctctttcc

SEQ ID NO: 26370 - DNA, 19 bp, Homo sapiens
aacatgggacccaacactt

SEQ ID NO: 26371 - DNA, 17 bp, Homo sapiens
ccaaagggtgtcaaggc

SEQ ID NO: 26372 - DNA, 18 bp, Homo sapiens
tccaaagggtgtcaaggt

SEQ ID NO: 26373 - DNA, 21 bp, Homo sapiens
gctgctggaatatgtttgaga

SEQ ID NO: 26374 - DNA, 17 bp, Homo sapiens
aggaacagcaagaaccg

SEQ ID NO: 26375 - DNA, 18 bp, Homo sapiens
caggaacagcaagaacca

SEQ ID NO: 26376 - DNA, 17 bp, Homo sapiens
caggagcctgcactctg

SEQ ID NO: 26377 - DNA, 20 bp, Homo sapiens
cacagtcaaagaatcaagcg

SEQ ID NO: 26378 - DNA, 21 bp, Homo sapiens
tcacagtcaaagaatcaagca

SEQ ID NO: 26379 - DNA, 21 bp, Homo sapiens
ccgtttgaattttccaataag

SEQ ID NO: 26380 - DNA, 16 bp, Homo sapiens
atgccacccactaccg

SEQ ID NO: 26381 - DNA, 17 bp, Homo sapiens
catgccacccactacca

SEQ ID NO: 26382 - DNA, 17 bp, Homo sapiens
ttttgcagccactcgat

SEQ ID NO: 26383 - DNA, 21 bp, Homo sapiens
cgtctccaggaaaatcataac

SEQ ID NO: 26384 - DNA, 21 bp, Homo sapiens
cgtctccaggaaaatcataat

SEQ ID NO: 26385 - DNA, 25 bp, Homo sapiens
tgagttattgctacttcagaatcat

SEQ ID NO: 26386 - DNA, 16 bp, Homo sapiens
agcagctccgagtcca

SEQ ID NO: 26387 - DNA, 16 bp, Homo sapiens
agcagctccgagtccg

SEQ ID NO: 26388 - DNA, 17 bp, Homo sapiens
ggcccacaaggtgaaat

SEQ ID NO: 26389 - DNA, 16 bp, Homo sapiens
ccacttcgggttcctc

SEQ ID NO: 26390 - DNA, 16 bp, Homo sapiens
ccacttcgggttcctg

SEQ ID NO: 26391 - DNA, 17 bp, Homo sapiens
ccctggcttcaacatga

SEQ ID NO: 26392 - DNA, 20 bp, Homo sapiens
tcaagaggacagtgatggtg

SEQ ID NO: 26393 - DNA, 20 bp, Homo sapiens
tcaagaggacagtgatggtc

SEQ ID NO: 26394 - DNA, 24 bp, Homo sapiens
tggttagaatctgtgaaggaacta

SEQ ID NO: 26395 - DNA, 15 bp, Homo sapiens
ccgcagaggtgtggg

SEQ ID NO: 26396 - DNA, 15 bp, Homo sapiens
ccgcagaggtgtggt

SEQ ID NO: 26397 - DNA, 18 bp, Homo sapiens
cattttgcggtggaaatg

SEQ ID NO: 26398 - DNA, 21 bp, Homo sapiens
gagtggccctatcaaatgtta

SEQ ID NO: 26399 - DNA, 19 bp, Homo sapiens
gtggccctatcaaatgttg

SEQ ID NO: 26400 - DNA, 21 bp, Homo sapiens
tttgttgtgcctgatgatgta

SEQ ID NO: 26401 - DNA, 18 bp, Homo sapiens
acagtcaggtggatctcc

SEQ ID NO: 26402 - DNA, 19 bp, Homo sapiens
cacagtcaggtggatctct

SEQ ID NO: 26403 - DNA, 20 bp, Homo sapiens
cacattcctggaggtgctag

SEQ ID NO: 26404 - DNA, 13 bp, Homo sapiens
cgcgcgctaaccg

SEQ ID NO: 26405 - DNA, 13 bp, Homo sapiens
cgcgcgctaacca

SEQ ID NO: 26406 - DNA, 18 bp, Homo sapiens
cgtccgtcatggatcaga

SEQ ID NO: 26407 - DNA, 14 bp, Homo sapiens
ctgctggccgtcct

SEQ ID NO: 26408 - DNA, 13 bp, Homo sapiens
tgctggccgtcca

SEQ ID NO: 26409 - DNA, 19 bp, Homo sapiens
actcacgcttgctttgact

SEQ ID NO: 26410 - DNA, 24 bp, Homo sapiens
ttaaataaggctctacctcaaaga

SEQ ID NO: 26411 - DNA, 24 bp, Homo sapiens
ttaaataaggctctacctcaaagt

SEQ ID NO: 26412 - DNA, 21 bp, Homo sapiens
ttttgatgcctgagaaagaag

SEQ ID NO: 26413 - DNA, 24 bp, Homo sapiens
tttgcagtttattaagatgaggat

SEQ ID NO: 26414 - DNA, 24 bp, Homo sapiens
tttgcagtttattaagatgaggac

SEQ ID NO: 26415 - DNA, 18 bp, Homo sapiens
cggtgctccctgtcataa
